(19) United States
(12) Patent Application Publication
(10) Pub. No.: US 2010/0310644 A1
(43) Pub. Date: Dec. 9, 2010

(54) ANTI-DANDRUFF COMPOSITIONS CONTAINING PEPTIDES

(75) Inventors: Burghard Liebmann, Bensheim (DE); Heike Brüser, Speyer (DE); Heiko Barg, Speyer (DE); Daniel Hümmerich, Frankenthal (DE); Hubertus Peter Bell, Mannheim (DE)

Correspondence Address: CONNOLLY BOVE LODGE & HUTZ, LLP, P O BOX 2207, WILMINGTON, DE, 19899, US

(73) Assignee: BASF ,Trademarks and Licenses, Ludwigshafen (DE)

(21) Appl. No.: 12/809,102

(22) PCT Filed: Dec. 19, 2008
(86) PCT No.: PCT/EP2008/010912

§ 371 Date: Jun. 18, 2010

Related U.S. Application Data
(60) Provisional application No. 61/080,705, filed on Jul. 15, 2008.

(30) Foreign Application Priority Data
Dec. 31, 2007 (EP) 07024988.3
Jul. 7, 2008 (EP) 08159834.4

(51) Int. Cl. A61K 9/127; G01N 33/00; A61K 38/10; A61P 17/00; C07K 14/00; C07K 7/08; C07K 7/06; C07H 21/04

(52) U.S. Cl. 424/450; 436/94; 514/21.4; 530/324; 530/325; 530/326; 530/327; 536/23.1; 536/24.5

(57) ABSTRACT

The present invention relates to the use of special peptides in composition which can be used in particular in hair and skin cosmetics, and to such peptide-containing compositions. In particular, the present invention relates to the use of such peptides as active ingredient for inhibition or treatment of dandruff which does not accumulate in the body or in the environment. Furthermore, the invention relates to the production of such compositions, to the peptides used themselves, to their production and to coding nucleotide sequences for such peptides, to dispensing systems for such peptides and to screening methods for identifying suitable further peptides.

[0001] The present invention relates to the use of special peptides in compositions which can be used in particular in hair and skin cosmetics, and to such peptide-containing compositions. In particular, the present invention relates to the use of such peptides as preservative or as prevention, active ingredient for inhibition or treatment of dandruff which does not accumulate in the body or in the environment. Furthermore, the invention relates to the production of such compositions, to the peptides used themselves, to their production and to coding nucleotide sequences for such peptides, to dispensing systems for such peptides and to screening methods for identifying suitable further peptides.

### BACKGROUND OF THE INVENTION

[0002] In the cosmetics field, microbial activity can lead to undesired changes, such as body odor, dandruff formation or open inflammations and spots. The prior art discloses the use of antimicrobial and/or antifungal substances in preparations, e.g. in cosmetics or in medicine. However, the development of new antimicrobial and/or antifungal compositions is constantly necessary due to the development of bacterial or fungal strains that are resistant to active ingredients. Of particular interest is the development of novel antimicrobial and anti-fungal compounds, respectively, which do not show negative effects on the human health and which show a good activity spectrum against harmful germs.

[0003] Diverse antimicrobial peptides are already described in the literature and summarized in reviews (Hancock, R. E. W. and Lehrer, R. 1998 in Trends in Biotechnology, 16: 82-88; Hancock, R. E. W. and Sahl, H. G. 2006 in Nature Biotechnology, 24: 1551-1557).

[0004] Fusion peptides, which combine two effective peptides, are likewise described in the literature. Wade et al. report on the antibacterial effect of various fusions of cecropin A from Hyalophora cecropia and bee toxin melittin (Wade, D. et al., 1992, International Journal of Peptide and Protein Research, 40: 429-436). Shin et al. describe the antibacterial effect of a fusion peptide of cecropin A from Hyalophora cecropia and magainin 2 from Xenopus laevis, consisting of 20 amino acids. Cecropin A consists of 37 amino acids and exhibits activity toward Gram-negative bacteria, but lower activity toward Gram-positive bacteria. Magainin 2 consists of 23 amino acids and is active against bacteria but also tumor cell lines. Compared to the fusion of cecropin A and melittin, this fusion exhibits considerably lower hemolytic activity for comparable antibacterial effect (Shin, S. Y. Kang, J. H., Lee, M. K., Kim, S. Y., Kim, Y., Hahm, K. S., 1998, Biochemistry and Molecular Biology International, 44: 1119-1126).

[0005] US 2003/0096745 A1 and U.S. Pat. No. 6,800,727 B2 claim these fusion peptides consisting of 20 amino acids and variants of this fusion which, as a result of the exchange of amino acids, in particular of positively charged amino acids and hydrophobic amino acids, are more positively charged and more hydrophobic.

[0006] Further developments of this cecropin-A-magainin-2 fusion peptide are described by Shin et al. 1999. It is found here that the construct P18 (HT2, SEQ ID NO:3) had lower hemolytic activity compared to the starting fusion, although the antibacterial activity toward Escherichia coli and Bacillus subtilis was not impaired (Shin et al. 1999 Journal of Peptide Research, 53: 82-90).

[0007] Furthermore, Shin et al. 2001 investigated the activity of the construct P18 and analogous constructs for their antibacterial activity also on other target bacteria such as Pseudomonas aeruginosa or Proteus vulgaris (Shin et al., 2001, Journal of Peptide Research, 58: 504-514).

[0008] First experiments on the effectiveness of P18 against fungi was published in January 2002 by Shin et al. Here, better effectiveness of the peptide P18 towards Candida albicans compared to magainin 2 was established (Shin et al., 2002, Biochemical and Biophysical Research Communications, 290: 558-562).

[0009] In addition to Candida albicans, the Ascomycetes Aspergillus flavus, Fusarium oxysporum and the Basidiomycete Trichosporon beigelii were inhibited with P18 and variants of the peptide. However, the most effective inhibition was achieved with P18 (Lee et al., 2004, Biotechnology Letters, 26: 337-341). An inhibition of lipophilic fungi, in particular of the genus Malassezia is not taught. Furthermore, no experiments are described which demonstrate a more effective effect of cecropin-magainin fusions compared to known, commercial antifungal substances.

[0010] The genus Malassezia are lipophilic fungi which in part belong to the normal resident flora on human skin. Many representatives are obligatorily lipophilic, only M. pachydermatis is described as optionally lipophilic. Nevertheless disorders which are associated with Malassezia ssp. are described. These include pityriasis versicolor, atopic dermatitis, pityriasis capitis, seborrhea and pityrosporum folliculitis or malassezia folliculitis, for which Malassezia ssp. are pathogens. (Cutsem et al., 1990, Journal of the American Academy of Dermatology, 22: 993-998, Nenoff et al., 2007, Aktuelle Dermatologie, 33: 26-32). For treatment, antimycotic, fungicidal agents are usually used. Examples thereof are ketokonazole, climbazole, zinc pyrithiones, piroctone olamine, selenium sulfides or some natural extracts (e.g. like juniper oil, rosemary oil), which are often added in the single-digit %, (w/w) range, for example, in antidandruff shampoo formulations.

[0011] However, some of the described substances for inhibiting, treating or preventing dandruff are either toxicologically unacceptable, or the cosmetic preparations are not effective enough (Kosmetische Medizin 5+6/2006). The species Malassezia furfur is less sensitive toward several antimycotics compared to other Malassezia species (Nenoff et al., 2007, Aktuelle Dermatologie, 33: 26-32). It is likewise described that substances which considerably inhibit the growth of Candida albicans even at low concentrations, only prevent the growth of Malassezia furfur at high concentrations, if at all. Thus, Nenoff et al. describe the inhibition of Candida albicans by phytosphingosines at concentrations of about 152-269 μg/ml whereas an inhibition of M. furfur only took place at approximately 25-fold higher concentrations (6250 μg/ml) for basic phytosphingosines, or M. furfur appeared to be resistant to phytosphingosine salts (Nenoff et al., 2002, Acta Derm Venerol, 82:170-173).

[0012] Similar observations were made for the peptide cilofungin by Hanson et al. 1989. While 76% of the C. albicans strains did not grow at a cilofungin concentration of 0.62 μg/ml, the obligatorily lipophilic M. furfur was not inhibited at these concentrations. The minimum inhibitory concentration of cilofungin for M. furfur was not stated. It was evidently not within the investigated range between 0.31 μg/ml and 40 μg/ml (Hanson et al., 1989, Antimicrobial agents and chemotherapy, 33:1391-1392).

[0013] In 2006, Lopez-Garcia et al. describe the growth inhibition of M. furfur with Cecropin P1 and magainin 2. Here, a moderate antifungal effect of cecropin P1 and a comparably better effect of magainin 2 at a concentration of 25 μM were found (Lopez-Garcia et al., 2006, Journal of Antimicrobial Chemotherapy, 57:877-882).

[0014] EP-A-0 866 804 describes the use of beta-defensins from human skin as active ingredient in cosmetic or pharmaceutical formulations. However, an internal comparison with antifungal active ingredients of the prior art is not made.

[0015] WO-A-00/032220 describes the use of a fungal polypeptide as antifungal active ingredient for the treatment of dandruff. However, an internal comparison with antifungal active ingredients of the prior art is not made here either.

[0016] US 2003/0096745 describes a polypeptide of the sequence KWKKLLKKPPPLLKKLLKKL with antibacterial and antifungal activity toward certain microorganisms. Antifungal activity was shown toward Candida albicans and Tricosphoron beigelii. Cosmetic applications, in particular for the treatment of dandruff, are not proposed.

[0017] However, the use of antimicrobial substances, particularly regular use, can lead to intolerance in people, or even to health damage. Intolerances may be skin reddening, irritations or sensitizations. Systemic absorption into the human body can lead to impairment of body functions. Particularly regular use of some antimicrobial substances can lead to an increase in their concentration. One known example is parabens (Dabre et al., 2004, Journal of Applied Toxicology, 24: 5-13). Depending on the application, an accumulation in the human body or in the environment may thus result.

[0018] In addition, excessive and inappropriate use of antimicrobial substances result time and again in resistance of the target organisms.

[0019] There is therefore a need to provide novel cosmetic antimicrobial compositions which firstly have antifungal effectiveness and are suitable for avoiding or treating dandruff. In particular, these should not accumulate in the body since they can be degraded in the natural surroundings.

[0020] There is in particular a need to provide antifungal active ingredients which are more effective against dandruff than the customary antidandruff agents known hitherto and in particular are effective against the dandruff fungus Malassezia furfur and other Malassezia ssp. Preferably, the natural skin flora should not be impaired, and the active ingredients should also not accumulate in the body or in the environment, but be degraded in the natural surroundings.

[0021] It was therefore an object of the present invention to provide a novel, effective but biodegradable active ingredient for avoiding, inhibiting and/or treating dandruff, in particular scurf. Advantageously, active ingredient compounds are to be identified which are suitable for producing cosmetic and/or dermatocosmetic formulations or preparations. Furthermore, systemic absorption of the active ingredient should be avoided. Additionally, it should be ensured that the preparations have low or no cytoxicity. In particular, the active ingredient should be effective against the yeast fungus Malassezia furfur, and also against other Malassezia ssp., in particular, obligatorily lipophilic species.

### SUMMARY OF THE INVENTION

[0022] This object was achieved by cosmetic compositions according to the definition in the attached patent claims.

[0023] Surprisingly, it has been found that the composition comprising at least one peptide with a claimed structure or a structure motif has adequate effectiveness against lipophilic fungal species, in particular Malassezia furfur, associated with good skin compatibility. Furthermore, a biodegradability was found which progresses more rapidly compared to customary antidandruff active ingredients such as zinc pyrithiones. Furthermore, it has surprisingly been found that the effect is better than the effect which is achieved with the peptides cecropin A or magainin II on their own.

### DETAILED DESCRIPTION OF THE INVENTION

### 1. General Definitions

[0024] A “helix breaker” means a section within a peptide according to the invention which, in the region of this section of the peptide chain, inhibits the formation of a helical secondary structure. The formation of a helix structure further away from the helix breaker, however, is not suppressed. Typical helix breakers are known to the person skilled in the art. In particular, the amino acid proline is a peptide building block with the property of a helix breaker. The same is true for proline-containing peptide fragments.

[0025] Within the context of the invention, “hydrophobic amino acids” are alanine, valine, leucine, isoleucine, phenylalanine, methionine and tryptophan.

[0026] Within the context of the invention, “hydrophilic amino acids” are in particular amino acids with polar side chains, such as serine, threonine, cysteine, tyrosine, asparagine and glutamine; acidic amino acids, such as aspartic acid and glutamic acid; and in particular basic amino acids, such as lysine, arginine and histidine.

[0027] “Capable of forming an alpha-helix arms” is a sequence which promotes the formation of a helical structure under suitable conditions. Artificial suitable conditions for forming helix structures are, for example, the solvent systems based on trifluoroacetic acid that promote alpha-helix formation, and also SDS.

[0028] “Percentage alpha-helicity” is understood as meaning a measurement value determined with the help of circular dichroism (CD) analysis, where the sample to be measured is obtained under standard conditions, such as, in particular, 50% (v/v) trifluoroacetic acid in 10 mM sodium phosphate buffer, pH 7.0, or 30 mM SDS in 10 mM sodium phosphate buffer, pH 7.0, using a measurement cell with 1 mm path length and at peptide concentration of 100 μg/ml. The calculation is made according to the following formula:

% helicity=100([⊖]−[⊖]⁰)/[⊖]¹⁰⁰

[0029] in which

[0030] [⊖] is the experimentally determined ellipticity at 222 nm;

[0031] [⊖]⁰ is the ellipticity at 222 nm and 0% helicity and

[0032] [⊖]¹⁰⁰ is the ellipticity at 222 nm and 100% helicity.

[0033] Suitable measurement conditions are described, for example, by Shin et al., 1999, Journal of Peptide Research, 53:82-90, to which reference is hereby expressly made.

[0034] A “repetitive sequence motif” is understood as meaning the linear arrangement of preferably identical peptide sequences which are linked together directly or indirectly, i.e. via “linker groups”, as defined herein.

[0035] The terms “mutants” and “variants” are used synonymously. These are understood as meaning in particular “functional” or “functionally equivalent” modifications, as described in more detail later, which still demonstrate the desired activity and thus applicability as antidandruff peptide.

[0036] The terms “cosmetic”, dermatocosmetic” or “dermatological” are likewise used synonymously.

[0037] A “fusion product” is understood as meaning the covalent or noncovalent linking of peptides and proteins (“fusion peptides”) and the covalent or noncovalent linking of peptides and polymers (“fusion polymers”). The linked constituents are cleavably joined together either irreversibly or reversibly, i.e. biologically, in particular enzymatically.

### 2. Preferred Embodiments

[0038] The invention firstly provides a cosmetic composition comprising, in a cosmetic carrier, a peptide which comprises at least one sequence motif of the following general formula I

Hel1-HB-Hel2 (I)

in which
“HB” comprises 1 to 5, in particular 1, 2 or 3, continuous amino acid residues and is a part sequence motif with the function of a helix breaker, and
“Hel1” and “Hel2” are identical or different part sequence motifs which each comprise 5 to 15, such as, for example, 6 to 12, in particular 8, 9 or 10, continuous amino acid residues which are essentially selected from hydrophilic residues and hydrophobic, in particular, basic, residues different from proline, and are in each case capable of forming an alpha-helix arm where at least one of the helix arms has, in its axial projection, i.e. in the top view corresponding to a “helical wheel” diagram, an incomplete separation into a hydrophobic, in particular basic, and hydrophilic helix half. Here, for example 1, 2, 3 or 4 positions one half of the type (hydrophobic or hydrophilic) can be occupied by amino acid residues of the other type (hydrophilic or hydrophobic, respectively).

[0039] By contrast, completely separated hydrophobic and hydrophilic helix halves would consist exclusively of hydrophobic or hydrophilic amino acid residues according to the above definition. One example of a completely hydrophilically/hydrophobically separated helix to be mentioned is the sequence motif KLKKLLKK.

[0040] A “helix half” is not necessarily to be understood here as meaning the numerical half, i.e. half the total number of amino acids of a helix. The numerical size of two halves can differ, for example, by 1 to 3 amino acids.

[0041] The invention secondly provides a cosmetic composition comprising, in a cosmetic carrier, a peptide which comprises at least one sequence motif of the following general formula I

Hel1-HB-Hel2 (I)

in which
“HB” comprises 1 to 5, in particular 1, 2 or 3, continuous amino acid residues and is a part sequence motif with the function of a helix breaker, and
“Hel1” and “Hel2” are identical or different part sequence motifs which each comprise 5 to 15, such as, for example, 6 to 12, in particular 8, 9 or 10, continuous amino acid residues which are essentially selected from hydrophilic residues and hydrophobic, in particular, basic, residues different from proline, and are in each case capable of forming an alpha-helix arm, where the peptide has a percentage alpha-helicity (% helicity) of from about 25 to 98%, such as, for example, 30 to 80% or 30 to 60%, in 50% (v/v) trifluoroacetic acid, pH 7.0; or a % helicity value of from about 10 to 70%, or 12 to 55% or 12 to 40%, in 30 mM SDS, pH 7.0, in each case determined by CD spectrometry.

[0042] The invention thirdly provides a cosmetic composition comprising, in a cosmetic carrier, at least one peptide with a sequence or a repetitive sequence motif according to SEQ ID NO: 1:

(SEQ ID NO: 1)

X₁ X₂K X₃ X₄ X₅KIP X₁₀ KFX₆X₇ X₈ AX₉KF

in which
X₁₀ is a peptide bond or one or two arbitrary basic or hydrophobic amino acid residues or one or two proline residues and
X₁ to X₉ are arbitrary basic amino acid residues or hydrophobic amino acid residues different from proline;
where the repetitive sequence motifs may be identical or different;
and/or mutants or derivatives thereof.
In particular, the invention provides compositions according to the above definition comprising at least one peptide with a sequence or a repetitive sequence motif according to SEQ ID NO: 2:

(SEQ ID NO: 2)

X₁ X₂K X₃ X₄ X₅KIP X₁₁ X₁₂ KFX₆X₇ X₈ AX₉KF

in which
X₁ is lysine, arginine or phenylalanine,
X₂ is lysine or tryptophan,
X₃ is leucine or lysine,
X₄ is phenylalanine or leucine,
X₅ is leucine or lysine,
X₆ is leucine or lysine,
X₇ is histidine or lysine,
X₈ is alanine, leucine, valine or serine,
X₉ is leucine or lysine,
X₁₁ is proline or a chemical bond, and
X₁₂ is proline or a chemical bond,
where the repetitive sequence motifs are identical or different;
and/or mutants or derivatives thereof.

[0043] Nonlimiting examples of the above sequences or repetitive sequence motifs according to SEQ ID NO: 3 are:

| | | |
|---|---|---|
| P18 | KWKLFKKIPKFLHLAKKF-NH₂ | (SEQ ID NO: 3) |
| RP18 | RWKLFKKIPKFLHLAKKF | (SEQ ID NO: 4) |
| KKFP18 | FKKLFKKIPKFLHAAKKF | (SEQ ID NO: 5) |
| KKLP18 | KWKLLKKIPKFKKLALKF | (SEQ ID NO: 6) |
| AP18 | KWKLFKKIPKFLHAAKKF | (SEQ ID NO: 7) |
| KFLP18 | KWKKFLKIPKFLHAAKKF | (SEQ ID NO: 8) |
| KLLP18 | KWKKLLKIPKFLHAAKKF | (SEQ ID NO: 9) |

and/or a mutant or derivative thereof.

[0044] Compositions according to the invention can in particular comprise peptides with a repetitive sequence motif, where a plurality, such as, in particular, 2 to 10 or 3 to 5, of peptides of the general formula I or according to SEQ ID NO: 1 to 9 or mutants or derivatives thereof are peptidically linked together via linker groups.

[0045] Here, the “linker groups” can comprise continuous, identical or different amino acid residues, preferably selected from alanine, glycine, threonine and serine, such as, for example, GGSGGT, GGSGGS, or poly-alanine linkers and poly-glycine linkers, where “poly” is 2 to 10; or selected from Asp, Pro, Asn and Gly, for example Asp-Pro and Asn-Gly.

[0046] Furthermore, peptides whose C-terminal carboxyl group is amidated can be used.

[0047] The invention also provides compositions comprising an, if appropriate, cleavable fusion polypeptide of at least one cosmetic, preferably peptidic auxiliary or active ingredient and at least one peptide according to the above definition. Examples of such active ingredients are: hydrophobins, keratin binding domains, albumin, lactoferrin, avidin, antibodies, preferably, keratin-binding antibodies, binding peptides for surfaces, preferably keratin-binding peptides, silk proteins, spider silk proteins, preferably C16, collagen, fibronectin, keratin, elastin, other structural proteins, preferably hair and skin structure proteins, binding proteins for skin and hair structure proteins, enamel-building proteins, amelogenin, binding proteins of the enamel-building proteins, binding proteins of amelogenin; where these fusions may be permanent or else cleavable.

[0048] The invention also provides fusion polymers of at least one cosmetic polymer and at least one peptide according to the above definition. Examples of such polymers are: polyhydroxyalkanoates, hyaluronic acid, glucan, spheroglucan, cellulose, xanthan, polyethylene glycol, polyglycerol, polylysine and silicones, which are present as covalent or noncovalent linkages.

[0049] Furthermore, it is conceivable that the abovementioned peptides can also be present in the compositions as covalent linkage to cosmetically/pharmaceutically active ingredients, such as panthenol, bisabolol, retinol, carotenoids, protein hydrolysates.

[0050] The invention also provides compositions according to the above definition, additionally comprising at least one further cosmetic or pharmaceutical active ingredient, such as, for example, at least one antiinflammatory active ingredient, an antimicrobial active ingredient for inhibiting the growth and/or the pathophysiological activity of undesired germs, such as, in particular, Malasezzia furfur, and/or a sebum-regulating active ingredient.

[0051] Examples of antiinflammatory active ingredients are: corticoids (e.g. cortisone), azathioprin, bisabolol, cyclosporin A, acetylsalicylic acid, ibuprofen, panthenol, camomile extract or aloe extracts, etc.

[0052] Examples of antimicrobial agents are: customary preservatives known to the person skilled in the art, such as alcohols, p-hydroxybenzoic acid esters, imidazolinylurea, formaldehyde, sorbic acid, benzoic acid, salicylic acid, etc. Such deodorizing substances are, for example, zinc ricinoleate, triclosan, undecylenic acid alkylolamides, triethyl citrate, chlorhexidine, etc. (cf. also section 3.5 below). They also include azoles (Ketoconazole, climbazole), zinc pyrithione, selenium sulfides, etc.

[0053] Examples of sebum-regulating active ingredients are: azelaic acid, sebacic acid, potassiumalezaoyldiglycinate, 10-hydroxydecanoic acid, 1,10-decanediol, aluminium salts, like aluminiumchlorohydrate, etc.

[0054] The peptide is present in the compositions according to the invention in a fraction of from 0.0001 to 50% by weight, in particular 0.001 to 10% by weight, and especially 0.005 to 0.1% by weight, in each case based on the total weight of the finished composition.

[0055] A further aspect of the present invention relates to compositions containing at least one peptide as defined above which shows for Malassezia furfur a minimal inhibitory concentration of about 1500 to 0.1 μM, as for example 500 to 1 μM, 100 to 5 μM or 50 to 10 μM, as determined under standard conditions. Standard conditions in this context relate to a Malassezia furfur culture, which shows an initial optical density of 0.1 at 600 nm, and which, after a 24 hour incubation with said peptide, which is contained at said minimum concentration in said culture medium, contains less than one colony-forming unit (CFU) of said microorganism per μl culture medium.

[0056] The invention further provides the use of a peptide according to the above definition or of a fusion polypeptide according to the above definition, optionally in combination with at least one further conventional, as for example low-molecular weight, antifungal agent, as for example Ketoconazole, Climbazole, Zincpyrithione or selenosulfides, for producing a cosmetic composition for the treatment or prevention of dandruff, in particular scurf, where the peptide is used in particular for suppressing the growth and/or the pathophysiological activity of lipophilic fungi, in particular Malassezia furfur and other species of the genus Malassezia, or for producing cosmetic compositions in which the peptide is present as preservative.

[0057] In this connection, various natural skin organisms are essentially not or only slightly inhibited in their growth and/or activity during the dandruff treatment.

[0058] The invention further provides a method of producing a cosmetic composition according to the above definition, where a peptide according to the above definition is formulated together with at least one customary cosmetic auxiliary and, if appropriate, further cosmetic or pharmaceutical active ingredients to give the desired administration form.

[0059] The invention further provides peptides according to the above definition and also nucleic acids coding for such peptides, and also complementary nucleic acids which hybridize with such coding nucleic acids under stringent conditions.

[0060] Furthermore, the invention relates to screening methods for antidandruff peptides, where, using a complementary nucleic acid according to the above definition as probe, a nucleic-acid-containing sample is screened for hybridizing sequences using the probe under stringent conditions.

[0061] Finally, the invention provides a dispensing system for releasing a peptide according to the above definition, where the peptide and, if appropriate, further ingredients present are associated with liposomes, zeolites, cyclodextrins, polyethyleneimine-based vector systems, which are, for example, present (dissolved, suspended, dispersed) therein.

[0062] P18 (SEQ ID NO: 3) is a peptide with a chain length of 18 amino acids which is derived from a fusion peptide from fragments of cecropin A from Hyalaphora cecropia and magainin from Xenopus laevis. Fungicidal activity was found for Candida albicans, Trichosporon beigelii, Aspergillus flavus and Fusarium oxysporum in experiments (Lee et al., (2004) Biotechnology Letters, 26:337-341.). However, the person skilled in the art is aware that the effect of fungicidal substances on different organisms can be very different. Particularly the effect on the lipophilic fungus Malassezia furfur and the lipophilic species of the genus Malassezia can differ for example significantly from the effect on Candida albicans (Hanson et al., (1989) Antimicrobial Agents and Chemotherapy, 33:1391-1392; Nenhoff et al., (2002) Acta Derm Venereol., 82:170-173). The effect of P18 observed according to the invention and structurally and functionally related peptides of the species described herein is therefore completely surprising to the person skilled in the art.

[0063] In a further particular embodiment, the secondary structure of the peptides according to the invention is a helix which is divided in the middle into two helices by a helix-breaking amino acid. In a depiction as “helical wheel”, hydrophobic amino acids, in particular leucine residues, predominate on one side (or half of the helix), and positively charged amino acids, in particular lysine residues, predominate on the other side.

[0064] The peptides according to the invention are composed in particular of D- and/or L-amino acids, in particular L-amino acids.

[0065] The peptides described herein and/or derivatives thereof can be produced in a manner known per se, such as through chemical solid-phase synthesis, liquid synthesis or biotechnologically using recombinant production strains or cell cultures.

### 3. Further Embodiments of the Invention

### 3.1 Examples of Further Suitable Sequence Motifs

3.1.1 Sequence motif
X₁ X₂K X₃ X₄ X₅KIP X₁₁ X₁₂ KFX₆X₇ X₈ AX₉KF
(SEQ ID NO: 2)

| | | |
|---|---|---|
| variant_0 | KKKLFLKIPPPKFLHAALKF | seqid_11 |
| variant_1 | RKKLFLKIPPPKFLHAALKF | seqid_12 |
| variant_2 | FKKLFLKIPPPKFLHAALKF | seqid_13 |
| variant_3 | KWKLFLKIPPPKFLHAALKF | seqid_14 |
| variant_4 | RWKLFLKIPPPKFLHAALKF | seqid_15 |
| variant_5 | FWKLFLKIPPPKFLHAALKF | seqid_16 |
| variant_6 | KKKKFLKIPPPKFLHAALKF | seqid_17 |
| variant_7 | RKKKFLKIPPPKFLHAALKF | seqid_18 |
| variant_8 | FKKKFLKIPPPKFLHAALKF | seqid_19 |
| variant_9 | KWKKFLKIPPPKFLHAALKF | seqid_20 |
| variant_10 | RWKKFLKIPPPKFLHAALKF | seqid_21 |
| variant_11 | FWKKFLKIPPPKFLHAALKF | seqid_22 |
| variant_12 | KKKLLLKIPPPKFLHAALKF | seqid_23 |
| variant_13 | RKKLLLKIPPPKFLHAALKF | seqid_24 |
| variant_14 | FKKLLLKIPPPKFLHAALKF | seqid_25 |
| variant_15 | KWKLLLKIPPPKFLHAALKF | seqid_26 |
| variant_16 | RWKLLLKIPPPKFLHAALKF | seqid_27 |
| variant_17 | FWKLLLKIPPPKFLHAALKF | seqid_28 |
| variant_18 | KKKKLLKIPPPKFLHAALKF | seqid_29 |
| variant_19 | RKKKLLKIPPPKFLHAALKF | seqid_30 |
| variant_20 | FKKKLLKIPPPKFLHAALKF | seqid_31 |
| variant_21 | KWKKLLKIPPPKFLHAALKF | seqid_32 |
| variant_22 | RWKKLLKIPPPKFLHAALKF | seqid_33 |
| variant_23 | FWKKLLKIPPPKFLHAALKF | seqid_34 |
| variant_24 | KKKLFKKIPPPKFLHAALKF | seqid_35 |
| variant_25 | RKKLFKKIPPPKFLHAALKF | seqid_36 |
| variant_26 | FKKLFKKIPPPKFLHAALKF | seqid_37 |
| variant_27 | KWKLFKKIPPPKFLHAALKF | seqid_38 |
| variant_28 | RWKLFKKIPPPKFLHAALKF | seqid_39 |
| variant_29 | FWKLFKKIPPPKFLHAALKF | seqid_40 |
| variant_30 | KKKKFKKIPPPKFLHAALKF | seqid_41 |
| variant_31 | RKKKFKKIPPPKFLHAALKF | seqid_42 |
| variant_32 | FKKKFKKIPPPKFLHAALKF | seqid_43 |
| variant_33 | KWKKFKKIPPPKFLHAALKF | seqid_44 |
| variant_34 | RWKKFKKIPPPKFLHAALKF | seqid_45 |
| variant_35 | FWKKFKKIPPPKFLHAALKF | seqid_46 |
| variant_36 | KKKLLKKIPPPKFLHAALKF | seqid_47 |
| variant_37 | RKKLLKKIPPPKFLHAALKF | seqid_48 |
| variant_38 | FKKLLKKIPPPKFLHAALKF | seqid_49 |
| variant_39 | KWKLLKKIPPPKFLHAALKF | seqid_50 |
| variant_40 | RWKLLKKIPPPKFLHAALKF | seqid_51 |
| variant_41 | FWKLLKKIPPPKFLHAALKF | seqid_52 |
| variant_42 | KKKKLKKIPPPKFLHAALKF | seqid_53 |
| variant_43 | RKKKLKKIPPPKFLHAALKF | seqid_54 |
| variant_44 | FKKKLKKIPPPKFLHAALKF | seqid_55 |
| variant_45 | KWKKLKKIPPPKFLHAALKF | seqid_56 |
| variant_46 | RWKKLKKIPPPKFLHAALKF | seqid_57 |
| variant_47 | FWKKLKKIPPPKFLHAALKF | seqid_58 |
| variant_48 | KKKLFLKIPPKFLHAALKF | seqid_59 |
| variant_49 | RKKLFLKIPPKFLHAALKF | seqid_60 |
| variant_50 | FKKLFLKIPPKFLHAALKF | seqid_61 |
| variant_51 | KWKLFLKIPPKFLHAALKF | seqid_62 |
| variant_52 | RWKLFLKIPPKFLHAALKF | seqid_63 |
| variant_53 | FWKLFLKIPPKFLHAALKF | seqid_64 |
| variant_54 | KKKKFLKIPPKFLHAALKF | seqid_65 |
| variant_55 | RKKKFLKIPPKFLHAALKF | seqid_66 |
| variant_56 | FKKKFLKIPPKFLHAALKF | seqid_67 |
| variant_57 | KWKKFLKIPPKFLHAALKF | seqid_68 |
| variant_58 | RWKKFLKIPPKFLHAALKF | seqid_69 |
| variant_59 | FWKKFLKIPPKFLHAALKF | seqid_70 |
| variant_60 | KKKLLLKIPPKFLHAALKF | seqid_71 |
| variant_61 | RKKLLLKIPPKFLHAALKF | seqid_72 |
| variant_62 | FKKLLLKIPPKFLHAALKF | seqid_73 |
| variant_63 | KWKLLLKIPPKFLHAALKF | seqid_74 |
| variant_64 | RWKLLLKIPPKFLHAALKF | seqid_75 |
| variant_65 | FWKLLLKIPPKFLHAALKF | seqid_76 |
| variant_66 | KKKKLLKIPPKFLHAALKF | seqid_77 |
| variant_67 | RKKKLLKIPPKFLHAALKF | seqid_78 |
| variant_68 | FKKKLLKIPPKFLHAALKF | seqid_79 |
| variant_69 | KWKKLLKIPPKFLHAALKF | seqid_80 |
| variant_70 | RWKKLLKIPPKFLHAALKF | seqid_81 |
| variant_71 | FWKKLLKIPPKFLHAALKF | seqid_82 |
| variant_72 | KKKLFKKIPPKFLHAALKF | seqid_83 |
| variant_73 | RKKLFKKIPPKFLHAALKF | seqid_84 |
| variant_74 | FKKLFKKIPPKFLHAALKF | seqid_85 |
| variant_75 | KWKLFKKIPPKFLHAALKF | seqid_86 |
| variant_76 | RWKLFKKIPPKFLHAALKF | seqid_87 |
| variant_77 | FWKLFKKIPPKFLHAALKF | seqid_88 |
| variant_78 | KKKKFKKIPPKFLHAALKF | seqid_89 |
| variant_79 | RKKKFKKIPPKFLHAALKF | seqid_90 |
| variant_80 | FKKKFKKIPPKFLHAALKF | seqid_91 |
| variant_81 | KWKKFKKIPPKFLHAALKF | seqid_92 |
| variant_82 | RWKKFKKIPPKFLHAALKF | seqid_93 |
| variant_83 | FWKKFKKIPPKFLHAALKF | seqid_94 |
| variant_84 | KKKLLKKIPPKFLHAALKF | seqid_95 |
| variant_85 | RKKLLKKIPPKFLHAALKF | seqid_96 |
| variant_86 | FKKLLKKIPPKFLHAALKF | seqid_97 |
| variant_87 | KWKLLKKIPPKFLHAALKF | seqid_98 |
| variant_88 | RWKLLKKIPPKFLHAALKF | seqid_99 |
| variant_89 | FWKLLKKIPPKFLHAALKF | seqid_100 |
| variant_90 | KKKKLKKIPPKFLHAALKF | seqid_101 |
| variant_91 | RKKKLKKIPPKFLHAALKF | seqid_102 |
| variant_92 | FKKKLKKIPPKFLHAALKF | seqid_103 |
| variant_93 | KWKKLKKIPPKFLHAALKF | seqid_104 |
| variant_94 | RWKKLKKIPPKFLHAALKF | seqid_105 |
| variant_95 | FWKKLKKIPPKFLHAALKF | seqid_106 |
| variant_144 | KKKLFLKIPKFLHAALKF | seqid_107 |
| variant_145 | RKKLFLKIPKFLHAALKF | seqid_108 |
| variant_146 | FKKLFLKIPKFLHAALKF | seqid_109 |
| variant_147 | KWKLFLKIPKFLHAALKF | seqid_110 |
| variant_148 | RWKLFLKIPKFLHAALKF | seqid_111 |
| variant_149 | FWKLFLKIPKFLHAALKF | seqid_112 |
| variant_150 | KKKKFLKIPKFLHAALKF | seqid_113 |
| variant_151 | RKKKFLKIPKFLHAALKF | seqid_114 |
| variant_152 | FKKKFLKIPKFLHAALKF | seqid_115 |
| variant_153 | KWKKFLKIPKFLHAALKF | seqid_116 |
| variant_154 | RWKKFLKIPKFLHAALKF | seqid_117 |
| variant_155 | FWKKFLKIPKFLHAALKF | seqid_118 |
| variant_156 | KKKLLLKIPKFLHAALKF | seqid_119 |
| variant_157 | RKKLLLKIPKFLHAALKF | seqid_120 |
| variant_158 | FKKLLLKIPKFLHAALKF | seqid_121 |
| variant_159 | KWKLLLKIPKFLHAALKF | seqid_122 |
| variant_160 | RWKLLLKIPKFLHAALKF | seqid_123 |
| variant_161 | FWKLLLKIPKFLHAALKF | seqid_124 |
| variant_162 | KKKKLLKIPKFLHAALKF | seqid_125 |
| variant_163 | RKKKLLKIPKFLHAALKF | seqid_126 |
| variant_164 | FKKKLLKIPKFLHAALKF | seqid_127 |
| variant_165 | KWKKLLKIPKFLHAALKF | seqid_128 |
| variant_166 | RWKKLLKIPKFLHAALKF | seqid_129 |
| variant_167 | FWKKLLKIPKFLHAALKF | seqid_130 |
| variant_168 | KKKLFKKIPKFLHAALKF | seqid_131 |
| variant_169 | RKKLFKKIPKFLHAALKF | seqid_132 |
| variant_170 | FKKLFKKIPKFLHAALKF | seqid_133 |
| variant_171 | KWKLFKKIPKFLHAALKF | seqid_134 |
| variant_172 | RWKLFKKIPKFLHAALKF | seqid_135 |
| variant_173 | FWKLFKKIPKFLHAALKF | seqid_136 |
| variant_174 | KKKKFKKIPKFLHAALKF | seqid_137 |
| variant_175 | RKKKFKKIPKFLHAALKF | seqid_138 |
| variant_176 | FKKKFKKIPKFLHAALKF | seqid_139 |
| variant_177 | KWKKFKKIPKFLHAALKF | seqid_140 |
| variant_178 | RWKKFKKIPKFLHAALKF | seqid_141 |
| variant_179 | FWKKFKKIPKFLHAALKF | seqid_142 |
| variant_180 | KKKLLKKIPKFLHAALKF | seqid_143 |
| variant_181 | RKKLLKKIPKFLHAALKF | seqid_144 |
| variant_182 | FKKLLKKIPKFLHAALKF | seqid_145 |
| variant_183 | KWKLLKKIPKFLHAALKF | seqid_146 |
| variant_184 | RWKLLKKIPKFLHAALKF | seqid_147 |
| variant_185 | FWKLLKKIPKFLHAALKF | seqid_148 |
| variant_186 | KKKKLKKIPKFLHAALKF | seqid_149 |
| variant_187 | RKKKLKKIPKFLHAALKF | seqid_150 |
| variant_188 | FKKKLKKIPKFLHAALKF | seqid_151 |
| variant_189 | KWKKLKKIPKFLHAALKF | seqid_152 |
| variant_190 | RWKKLKKIPKFLHAALKF | seqid_153 |
| variant_191 | FWKKLKKIPKFLHAALKF | seqid_154 |
| variant_192 | KKKLFLKIPPPKFKHAALKF | seqid_155 |
| variant_193 | RKKLFLKIPPPKFKHAALKF | seqid_156 |
| variant_194 | FKKLFLKIPPPKFKHAALKF | seqid_157 |
| variant_195 | KWKLFLKIPPPKFKHAALKF | seqid_158 |
| variant_196 | RWKLFLKIPPPKFKHAALKF | seqid_159 |
| variant_197 | FWKLFLKIPPPKFKHAALKF | seqid_160 |
| variant_198 | KKKKFLKIPPPKFKHAALKF | seqid_161 |
| variant_199 | RKKKFLKIPPPKFKHAALKF | seqid_162 |
| variant_200 | FKKKFLKIPPPKFKHAALKF | seqid_163 |
| variant_201 | KWKKFLKIPPPKFKHAALKF | seqid_164 |
| variant_202 | RWKKFLKIPPPKFKHAALKF | seqid_165 |
| variant_203 | FWKKFLKIPPPKFKHAALKF | seqid_166 |
| variant_204 | KKKLLLKIPPPKFKHAALKF | seqid_167 |
| variant_205 | RKKLLLKIPPPKFKHAALKF | seqid_168 |
| variant_206 | FKKLLLKIPPPKFKHAALKF | seqid_169 |
| variant_207 | KWKLLLKIPPPKFKHAALKF | seqid_170 |
| variant_208 | RWKLLLKIPPPKFKHAALKF | seqid_171 |
| variant_209 | FWKLLLKIPPPKFKHAALKF | seqid_172 |
| variant_210 | KKKKLLKIPPPKFKHAALKF | seqid_173 |
| variant_211 | RKKKLLKIPPPKFKHAALKF | seqid_174 |
| variant_212 | FKKKLLKIPPPKFKHAALKF | seqid_175 |
| variant_213 | KWKKLLKIPPPKFKHAALKF | seqid_176 |
| variant_214 | RWKKLLKIPPPKFKHAALKF | seqid_177 |
| variant_215 | FWKKLLKIPPPKFKHAALKF | seqid_178 |
| variant_216 | KKKLFKKIPPPKFKHAALKF | seqid_179 |
| variant_217 | RKKLFKKIPPPKFKHAALKF | seqid_180 |
| variant_218 | FKKLFKKIPPPKFKHAALKF | seqid_181 |
| variant_219 | KWKLFKKIPPPKFKHAALKF | seqid_182 |
| variant_220 | RWKLFKKIPPPKFKHAALKF | seqid_183 |
| variant_221 | FWKLFKKIPPPKFKHAALKF | seqid_184 |
| variant_222 | KKKKFKKIPPPKFKHAALKF | seqid_185 |
| variant_223 | RKKKFKKIPPPKFKHAALKF | seqid_186 |
| variant_224 | FKKKFKKIPPPKFKHAALKF | seqid_187 |
| variant_225 | KWKKFKKIPPPKFKHAALKF | seqid_188 |
| variant_226 | RWKKFKKIPPPKFKHAALKF | seqid_189 |
| variant_227 | FWKKFKKIPPPKFKHAALKF | seqid_190 |
| variant_228 | KKKLLKKIPPPKFKHAALKF | seqid_191 |
| variant_229 | RKKLLKKIPPPKFKHAALKF | seqid_192 |
| variant_230 | FKKLLKKIPPPKFKHAALKF | seqid_193 |
| variant_231 | KWKLLKKIPPPKFKHAALKF | seqid_194 |
| variant_232 | RWKLLKKIPPPKFKHAALKF | seqid_195 |
| variant_233 | FWKLLKKIPPPKFKHAALKF | seqid_196 |
| variant_234 | KKKKLKKIPPPKFKHAALKF | seqid_197 |
| variant_235 | RKKKLKKIPPPKFKHAALKF | seqid_198 |
| variant_236 | FKKKLKKIPPPKFKHAALKF | seqid_199 |
| variant_237 | KWKKLKKIPPPKFKHAALKF | seqid_200 |
| variant_238 | RWKKLKKIPPPKFKHAALKF | seqid_201 |
| variant_239 | FWKKLKKIPPPKFKHAALKF | seqid_202 |
| variant_240 | KKKLFLKIPPKFKHAALKF | seqid_203 |
| variant_241 | RKKLFLKIPPKFKHAALKF | seqid_204 |
| variant_242 | FKKLFLKIPPKFKHAALKF | seqid_205 |
| variant_243 | KWKLFLKIPPKFKHAALKF | seqid_206 |
| variant_244 | RWKLFLKIPPKFKHAALKF | seqid_207 |
| variant_245 | FWKLFLKIPPKFKHAALKF | seqid_208 |
| variant_246 | KKKKFLKIPPKFKHAALKF | seqid_209 |
| variant_247 | RKKKFLKIPPKFKHAALKF | seqid_210 |
| variant_248 | FKKKFLKIPPKFKHAALKF | seqid_211 |
| variant_249 | KWKKFLKIPPKFKHAALKF | seqid_212 |
| variant_250 | RWKKFLKIPPKFKHAALKF | seqid_213 |
| variant_251 | FWKKFLKIPPKFKHAALKF | seqid_214 |
| variant_252 | KKKLLLKIPPKFKHAALKF | seqid_215 |
| variant_253 | RKKLLLKIPPKFKHAALKF | seqid_216 |
| variant_254 | FKKLLLKIPPKFKHAALKF | seqid_217 |
| variant_255 | KWKLLLKIPPKFKHAALKF | seqid_218 |
| variant_256 | RWKLLLKIPPKFKHAALKF | seqid_219 |
| variant_257 | FWKLLLKIPPKFKHAALKF | seqid_220 |
| variant_258 | KKKKLLKIPPKFKHAALKF | seqid_221 |
| variant_259 | RKKKLLKIPPKFKHAALKF | seqid_222 |
| variant_260 | FKKKLLKIPPKFKHAALKF | seqid_223 |
| variant_261 | KWKKLLKIPPKFKHAALKF | seqid_224 |
| variant_262 | RWKKLLKIPPKFKHAALKF | seqid_225 |
| variant_263 | FWKKLLKIPPKFKHAALKF | seqid_226 |
| variant_264 | KKKLFKKIPPKFKHAALKF | seqid_227 |
| variant_265 | RKKLFKKIPPKFKHAALKF | seqid_228 |
| variant_266 | FKKLFKKIPPKFKHAALKF | seqid_229 |
| variant_267 | KWKLFKKIPPKFKHAALKF | seqid_230 |
| variant_268 | RWKLFKKIPPKFKHAALKF | seqid_231 |
| variant_269 | FWKLFKKIPPKFKHAALKF | seqid_232 |
| variant_270 | KKKKFKKIPPKFKHAALKF | seqid_233 |
| variant_271 | RKKKFKKIPPKFKHAALKF | seqid_234 |
| variant_272 | FKKKFKKIPPKFKHAALKF | seqid_235 |
| variant_273 | KWKKFKKIPPKFKHAALKF | seqid_236 |
| variant_274 | RWKKFKKIPPKFKHAALKF | seqid_237 |
| variant_275 | FWKKFKKIPPKFKHAALKF | seqid_238 |
| variant_276 | KKKLLKKIPPKFKHAALKF | seqid_239 |
| variant_277 | RKKLLKKIPPKFKHAALKF | seqid_240 |
| variant_278 | FKKLLKKIPPKFKHAALKF | seqid_241 |
| variant_279 | KWKLLKKIPPKFKHAALKF | seqid_242 |
| variant_280 | RWKLLKKIPPKFKHAALKF | seqid_243 |
| variant_281 | FWKLLKKIPPKFKHAALKF | seqid_244 |
| variant_282 | KKKKLKKIPPKFKHAALKF | seqid_245 |
| variant_283 | RKKKLKKIPPKFKHAALKF | seqid_246 |
| variant_284 | FKKKLKKIPPKFKHAALKF | seqid_247 |
| variant_285 | KWKKLKKIPPKFKHAALKF | seqid_248 |
| variant_286 | RWKKLKKIPPKFKHAALKF | seqid_249 |
| variant_287 | FWKKLKKIPPKFKHAALKF | seqid_250 |
| variant_336 | KKKLFLKIPKFKHAALKF | seqid_251 |
| variant_337 | RKKLFLKIPKFKHAALKF | seqid_252 |
| variant_338 | FKKLFLKIPKFKHAALKF | seqid_253 |
| variant_339 | KWKLFLKIPKFKHAALKF | seqid_254 |
| variant_340 | RWKLFLKIPKFKHAALKF | seqid_255 |
| variant_341 | FWKLFLKIPKFKHAALKF | seqid_256 |
| variant_342 | KKKKFLKIPKFKHAALKF | seqid_257 |
| variant_343 | RKKKFLKIPKFKHAALKF | seqid_258 |
| variant_344 | FKKKFLKIPKFKHAALKF | seqid_259 |
| variant_345 | KWKKFLKIPKFKHAALKF | seqid_260 |
| variant_346 | RWKKFLKIPKFKHAALKF | seqid_261 |
| variant_347 | FWKKFLKIPKFKHAALKF | seqid_262 |
| variant_348 | KKKLLLKIPKFKHAALKF | seqid_263 |
| variant_349 | RKKLLLKIPKFKHAALKF | seqid_264 |
| variant_350 | FKKLLLKIPKFKHAALKF | seqid_265 |
| variant_351 | KWKLLLKIPKFKHAALKF | seqid_266 |
| variant_352 | RWKLLLKIPKFKHAALKF | seqid_267 |
| variant_353 | FWKLLLKIPKFKHAALKF | seqid_268 |
| variant_354 | KKKKLLKIPKFKHAALKF | seqid_269 |
| variant_355 | RKKKLLKIPKFKHAALKF | seqid_270 |
| variant_356 | FKKKLLKIPKFKHAALKF | seqid_271 |
| variant_357 | KWKKLLKIPKFKHAALKF | seqid_272 |
| variant_358 | RWKKLLKIPKFKHAALKF | seqid_273 |
| variant_359 | FWKKLLKIPKFKHAALKF | seqid_274 |
| variant_360 | KKKLFKKIPKFKHAALKF | seqid_275 |
| variant_361 | RKKLFKKIPKFKHAALKF | seqid_276 |
| variant_362 | FKKLFKKIPKFKHAALKF | seqid_277 |
| variant_363 | KWKLFKKIPKFKHAALKF | seqid_278 |
| variant_364 | RWKLFKKIPKFKHAALKF | seqid_279 |
| variant_365 | FWKLFKKIPKFKHAALKF | seqid_280 |
| variant_366 | KKKKFKKIPKFKHAALKF | seqid_281 |
| variant_367 | RKKKFKKIPKFKHAALKF | seqid_282 |
| variant_368 | FKKKFKKIPKFKHAALKF | seqid_283 |
| variant_369 | KWKKFKKIPKFKHAALKF | seqid_284 |
| variant_370 | RWKKFKKIPKFKHAALKF | seqid_285 |
| variant_371 | FWKKFKKIPKFKHAALKF | seqid_286 |
| variant_372 | KKKLLKKIPKFKHAALKF | seqid_287 |
| variant_373 | RKKLLKKIPKFKHAALKF | seqid_288 |
| variant_374 | FKKLLKKIPKFKHAALKF | seqid_289 |
| variant_375 | KWKLLKKIPKFKHAALKF | seqid_290 |
| variant_376 | RWKLLKKIPKFKHAALKF | seqid_291 |
| variant_377 | FWKLLKKIPKFKHAALKF | seqid_292 |
| variant_378 | KKKKLKKIPKFKHAALKF | seqid_293 |
| variant_379 | RKKKLKKIPKFKHAALKF | seqid_294 |
| variant_380 | FKKKLKKIPKFKHAALKF | seqid_295 |
| variant_381 | KWKKLKKIPKFKHAALKF | seqid_296 |
| variant_382 | RWKKLKKIPKFKHAALKF | seqid_297 |
| variant_383 | FWKKLKKIPKFKHAALKF | seqid_298 |
| variant_384 | KKKLFLKIPPPKFLKAALKF | seqid_299 |
| variant_385 | RKKLFLKIPPPKFLKAALKF | seqid_300 |
| variant_386 | FKKLFLKIPPPKFLKAALKF | seqid_301 |
| variant_387 | KWKLFLKIPPPKFLKAALKF | seqid_302 |
| variant_388 | RWKLFLKIPPPKFLKAALKF | seqid_303 |
| variant_389 | FWKLFLKIPPPKFLKAALKF | seqid_304 |
| variant_390 | KKKKFLKIPPPKFLKAALKF | seqid_305 |
| variant_391 | RKKKFLKIPPPKFLKAALKF | seqid_306 |
| variant_392 | FKKKFLKIPPPKFLKAALKF | seqid_307 |
| variant_393 | KWKKFLKIPPPKFLKAALKF | seqid_308 |
| variant_394 | RWKKFLKIPPPKFLKAALKF | seqid_309 |
| variant_395 | FWKKFLKIPPPKFLKAALKF | seqid_310 |
| variant_396 | KKKLLLKIPPPKFLKAALKF | seqid_311 |
| variant_397 | RKKLLLKIPPPKFLKAALKF | seqid_312 |
| variant_398 | FKKLLLKIPPPKFLKAALKF | seqid_313 |
| variant_399 | KWKLLLKIPPPKFLKAALKF | seqid_314 |
| variant_400 | RWKLLLKIPPPKFLKAALKF | seqid_315 |
| variant_401 | FWKLLLKIPPPKFLKAALKF | seqid_316 |
| variant_402 | KKKKLLKIPPPKFLKAALKF | seqid_317 |
| variant_403 | RKKKLLKIPPPKFLKAALKF | seqid_318 |
| variant_404 | FKKKLLKIPPPKFLKAALKF | seqid_319 |
| variant_405 | KWKKLLKIPPPKFLKAALKF | seqid_320 |
| variant_406 | RWKKLLKIPPPKFLKAALKF | seqid_321 |
| variant_407 | FWKKLLKIPPPKFLKAALKF | seqid_322 |
| variant_408 | KKKLFKKIPPPKFLKAALKF | seqid_323 |
| variant_409 | RKKLFKKIPPPKFLKAALKF | seqid_324 |
| variant_410 | FKKLFKKIPPPKFLKAALKF | seqid_325 |
| variant_411 | KWKLFKKIPPPKFLKAALKF | seqid_326 |
| variant_412 | RWKLFKKIPPPKFLKAALKF | seqid_327 |
| variant_413 | FWKLFKKIPPPKFLKAALKF | seqid_328 |
| variant_414 | KKKKFKKIPPPKFLKAALKF | seqid_329 |
| variant_415 | RKKKFKKIPPPKFLKAALKF | seqid_330 |
| variant_416 | FKKKFKKIPPPKFLKAALKF | seqid_331 |
| variant_417 | KWKKFKKIPPPKFLKAALKF | seqid_332 |
| variant_418 | RWKKFKKIPPPKFLKAALKF | seqid_333 |
| variant_419 | FWKKFKKIPPPKFLKAALKF | seqid_334 |
| variant_420 | KKKLLKKIPPPKFLKAALKF | seqid_335 |
| variant_421 | RKKLLKKIPPPKFLKAALKF | seqid_336 |
| variant_422 | FKKLLKKIPPPKFLKAALKF | seqid_337 |
| variant_423 | KWKLLKKIPPPKFLKAALKF | seqid_338 |
| variant_424 | RWKLLKKIPPPKFLKAALKF | seqid_339 |
| variant_425 | FWKLLKKIPPPKFLKAALKF | seqid_340 |
| variant_426 | KKKKLKKIPPPKFLKAALKF | seqid_341 |
| variant_427 | RKKKLKKIPPPKFLKAALKF | seqid_342 |
| variant_428 | FKKKLKKIPPPKFLKAALKF | seqid_343 |
| variant_429 | KWKKLKKIPPPKFLKAALKF | seqid_344 |
| variant_430 | RWKKLKKIPPPKFLKAALKF | seqid_345 |
| variant_431 | FWKKLKKIPPPKFLKAALKF | seqid_346 |
| variant_432 | KKKLFLKIPPKFLKAALKF | seqid_347 |
| variant_433 | RKKLFLKIPPKFLKAALKF | seqid_348 |
| variant_434 | FKKLFLKIPPKFLKAALKF | seqid_349 |
| variant_435 | KWKLFLKIPPKFLKAALKF | seqid_350 |
| variant_436 | RWKLFLKIPPKFLKAALKF | seqid_351 |
| variant_437 | FWKLFLKIPPKFLKAALKF | seqid_352 |
| variant_438 | KKKKFLKIPPKFLKAALKF | seqid_353 |
| variant_439 | RKKKFLKIPPKFLKAALKF | seqid_354 |
| variant_440 | FKKKFLKIPPKFLKAALKF | seqid_355 |
| variant_441 | KWKKFLKIPPKFLKAALKF | seqid_356 |
| variant_442 | RWKKFLKIPPKFLKAALKF | seqid_357 |
| variant_443 | FWKKFLKIPPKFLKAALKF | seqid_358 |
| variant_444 | KKKLLLKIPPKFLKAALKF | seqid_359 |
| variant_445 | RKKLLLKIPPKFLKAALKF | seqid_360 |
| variant_446 | FKKLLLKIPPKFLKAALKF | seqid_361 |
| variant_447 | KWKLLLKIPPKFLKAALKF | seqid_362 |
| variant_448 | RWKLLLKIPPKFLKAALKF | seqid_363 |
| variant_449 | FWKLLLKIPPKFLKAALKF | seqid_364 |
| variant_450 | KKKKLLKIPPKFLKAALKF | seqid_365 |
| variant_451 | RKKKLLKIPPKFLKAALKF | seqid_366 |
| variant_452 | FKKKLLKIPPKFLKAALKF | seqid_367 |
| variant_453 | KWKKLLKIPPKFLKAALKF | seqid_368 |
| variant_454 | RWKKLLKIPPKFLKAALKF | seqid_369 |
| variant_455 | FWKKLLKIPPKFLKAALKF | seqid_370 |
| variant_456 | KKKLFKKIPPKFLKAALKF | seqid_371 |
| variant_457 | RKKLFKKIPPKFLKAALKF | seqid_372 |
| variant_458 | FKKLFKKIPPKFLKAALKF | seqid_373 |
| variant_459 | KWKLFKKIPPKFLKAALKF | seqid_374 |
| variant_460 | RWKLFKKIPPKFLKAALKF | seqid_375 |
| variant_461 | FWKLFKKIPPKFLKAALKF | seqid_376 |
| variant_462 | KKKKFKKIPPKFLKAALKF | seqid_377 |
| variant_463 | RKKKFKKIPPKFLKAALKF | seqid_378 |
| variant_464 | FKKKFKKIPPKFLKAALKF | seqid_379 |
| variant_465 | KWKKFKKIPPKFLKAALKF | seqid_380 |
| variant_466 | RWKKFKKIPPKFLKAALKF | seqid_381 |
| variant_467 | FWKKFKKIPPKFLKAALKF | seqid_382 |
| variant_468 | KKKLLKKIPPKFLKAALKF | seqid_383 |
| variant_469 | RKKLLKKIPPKFLKAALKF | seqid_384 |
| variant_470 | FKKLLKKIPPKFLKAALKF | seqid_385 |
| variant_471 | KWKLLKKIPPKFLKAALKF | seqid_386 |
| variant_472 | RWKLLKKIPPKFLKAALKF | seqid_387 |
| variant_473 | FWKLLKKIPPKFLKAALKF | seqid_388 |
| variant_474 | KKKKLKKIPPKFLKAALKF | seqid_389 |
| variant_475 | RKKKLKKIPPKFLKAALKF | seqid_390 |
| variant_476 | FKKKLKKIPPKFLKAALKF | seqid_391 |
| variant_477 | KWKKLKKIPPKFLKAALKF | seqid_392 |
| variant_478 | RWKKLKKIPPKFLKAALKF | seqid_393 |
| variant_479 | FWKKLKKIPPKFLKAALKF | seqid_394 |
| variant_528 | KKKLFLKIPKFLKAALKF | seqid_395 |
| variant_529 | RKKLFLKIPKFLKAALKF | seqid_396 |
| variant_530 | FKKLFLKIPKFLKAALKF | seqid_397 |
| variant_531 | KWKLFLKIPKFLKAALKF | seqid_398 |
| variant_532 | RWKLFLKIPKFLKAALKF | seqid_399 |
| variant_533 | FWKLFLKIPKFLKAALKF | seqid_400 |
| variant_534 | KKKKFLKIPKFLKAALKF | seqid_401 |
| variant_535 | RKKKFLKIPKFLKAALKF | seqid_402 |
| variant_536 | FKKKFLKIPKFLKAALKF | seqid_403 |
| variant_537 | KWKKFLKIPKFLKAALKF | seqid_404 |
| variant_538 | RWKKFLKIPKFLKAALKF | seqid_405 |
| variant_539 | FWKKFLKIPKFLKAALKF | seqid_406 |
| variant_540 | KKKLLLKIPKFLKAALKF | seqid_407 |
| variant_541 | RKKLLLKIPKFLKAALKF | seqid_408 |
| variant_542 | FKKLLLKIPKFLKAALKF | seqid_409 |
| variant_543 | KWKLLLKIPKFLKAALKF | seqid_410 |
| variant_544 | RWKLLLKIPKFLKAALKF | seqid_411 |
| variant_545 | FWKLLLKIPKFLKAALKF | seqid_412 |
| variant_546 | KKKKLLKIPKFLKAALKF | seqid_413 |
| variant_547 | RKKKLLKIPKFLKAALKF | seqid_414 |
| variant_548 | FKKKLLKIPKFLKAALKF | seqid_415 |
| variant_549 | KWKKLLKIPKFLKAALKF | seqid_416 |
| variant_550 | RWKKLLKIPKFLKAALKF | seqid_417 |
| variant_551 | FWKKLLKIPKFLKAALKF | seqid_418 |
| variant_552 | KKKLFKKIPKFLKAALKF | seqid_419 |
| variant_553 | RKKLFKKIPKFLKAALKF | seqid_420 |
| variant_554 | FKKLFKKIPKFLKAALKF | seqid_421 |
| variant_555 | KWKLFKKIPKFLKAALKF | seqid_422 |
| variant_556 | RWKLFKKIPKFLKAALKF | seqid_423 |
| variant_557 | FWKLFKKIPKFLKAALKF | seqid_424 |
| variant_558 | KKKKFKKIPKFLKAALKF | seqid_425 |
| variant_559 | RKKKFKKIPKFLKAALKF | seqid_426 |
| variant_560 | FKKKFKKIPKFLKAALKF | seqid_427 |
| variant_561 | KWKKFKKIPKFLKAALKF | seqid_428 |
| variant_562 | RWKKFKKIPKFLKAALKF | seqid_429 |
| variant_563 | FWKKFKKIPKFLKAALKF | seqid_430 |
| variant_564 | KKKLLKKIPKFLKAALKF | seqid_431 |
| variant_565 | RKKLLKKIPKFLKAALKF | seqid_432 |
| variant_566 | FKKLLKKIPKFLKAALKF | seqid_433 |
| variant_567 | KWKLLKKIPKFLKAALKF | seqid_434 |
| variant_568 | RWKLLKKIPKFLKAALKF | seqid_435 |
| variant_569 | FWKLLKKIPKFLKAALKF | seqid_436 |
| variant_570 | KKKKLKKIPKFLKAALKF | seqid_437 |
| variant_571 | RKKKLKKIPKFLKAALKF | seqid_438 |
| variant_572 | FKKKLKKIPKFLKAALKF | seqid_439 |
| variant_573 | KWKKLKKIPKFLKAALKF | seqid_440 |
| variant_574 | RWKKLKKIPKFLKAALKF | seqid_441 |
| variant_575 | FWKKLKKIPKFLKAALKF | seqid_442 |
| variant_576 | KKKLFLKIPPPKFKKAALKF | seqid_443 |
| variant_577 | RKKLFLKIPPPKFKKAALKF | seqid_444 |
| variant_578 | FKKLFLKIPPPKFKKAALKF | seqid_445 |
| variant_579 | KWKLFLKIPPPKFKKAALKF | seqid_446 |
| variant_580 | RWKLFLKIPPPKFKKAALKF | seqid_447 |
| variant_581 | FWKLFLKIPPPKFKKAALKF | seqid_448 |
| variant_582 | KKKKFLKIPPPKFKKAALKF | seqid_449 |
| variant_583 | RKKKFLKIPPPKFKKAALKF | seqid_450 |
| variant_584 | FKKKFLKIPPPKFKKAALKF | seqid_451 |
| variant_585 | KWKKFLKIPPPKFKKAALKF | seqid_452 |
| variant_586 | RWKKFLKIPPPKFKKAALKF | seqid_453 |
| variant_587 | FWKKFLKIPPPKFKKAALKF | seqid_454 |
| variant_588 | KKKLLLKIPPPKFKKAALKF | seqid_455 |
| variant_589 | RKKLLLKIPPPKFKKAALKF | seqid_456 |
| variant_590 | FKKLLLKIPPPKFKKAALKF | seqid_457 |
| variant_591 | KWKLLLKIPPPKFKKAALKF | seqid_458 |
| variant_592 | RWKLLLKIPPPKFKKAALKF | seqid_459 |
| variant_593 | FWKLLLKIPPPKFKKAALKF | seqid_460 |
| variant_594 | KKKKLLKIPPPKFKKAALKF | seqid_461 |
| variant_595 | RKKKLLKIPPPKFKKAALKF | seqid_462 |
| variant_596 | FKKKLLKIPPPKFKKAALKF | seqid_463 |
| variant_597 | KWKKLLKIPPPKFKKAALKF | seqid_464 |
| variant_598 | RWKKLLKIPPPKFKKAALKF | seqid_465 |
| variant_599 | FWKKLLKIPPPKFKKAALKF | seqid_466 |
| variant_600 | KKKLFKKIPPPKFKKAALKF | seqid_467 |
| variant_601 | RKKLFKKIPPPKFKKAALKF | seqid_468 |
| variant_602 | FKKLFKKIPPPKFKKAALKF | seqid_469 |
| variant_603 | KWKLFKKIPPPKFKKAALKF | seqid_470 |
| variant_604 | RWKLFKKIPPPKFKKAALKF | seqid_471 |
| variant_605 | FWKLFKKIPPPKFKKAALKF | seqid_472 |
| variant_606 | KKKKFKKIPPPKFKKAALKF | seqid_473 |
| variant_607 | RKKKFKKIPPPKFKKAALKF | seqid_474 |
| variant_608 | FKKKFKKIPPPKFKKAALKF | seqid_475 |
| variant_609 | KWKKFKKIPPPKFKKAALKF | seqid_476 |
| variant_610 | RWKKFKKIPPPKFKKAALKF | seqid_477 |
| variant_611 | FWKKFKKIPPPKFKKAALKF | seqid_478 |
| variant_612 | KKKLLKKIPPPKFKKAALKF | seqid_479 |
| variant_613 | RKKLLKKIPPPKFKKAALKF | seqid_480 |
| variant_614 | FKKLLKKIPPPKFKKAALKF | seqid_481 |
| variant_615 | KWKLLKKIPPPKFKKAALKF | seqid_482 |
| variant_616 | RWKLLKKIPPPKFKKAALKF | seqid_483 |
| variant_617 | FWKLLKKIPPPKFKKAALKF | seqid_484 |
| variant_618 | KKKKLKKIPPPKFKKAALKF | seqid_485 |
| variant_619 | RKKKLKKIPPPKFKKAALKF | seqid_486 |
| variant_620 | FKKKLKKIPPPKFKKAALKF | seqid_487 |
| variant_621 | KWKKLKKIPPPKFKKAALKF | seqid_488 |
| variant_622 | RWKKLKKIPPPKFKKAALKF | seqid_489 |
| variant_623 | FWKKLKKIPPPKFKKAALKF | seqid_490 |
| variant_624 | KKKLFLKIPPKFKKAALKF | seqid_491 |
| variant_625 | RKKLFLKIPPKFKKAALKF | seqid_492 |
| variant_626 | FKKLFLKIPPKFKKAALKF | seqid_493 |
| variant_627 | KWKLFLKIPPKFKKAALKF | seqid_494 |
| variant_628 | RWKLFLKIPPKFKKAALKF | seqid_495 |
| variant_629 | FWKLFLKIPPKFKKAALKF | seqid_496 |
| variant_630 | KKKKFLKIPPKFKKAALKF | seqid_497 |
| variant_631 | RKKKFLKIPPKFKKAALKF | seqid_498 |
| variant_632 | FKKKFLKIPPKFKKAALKF | seqid_499 |
| variant_633 | KWKKFLKIPPKFKKAALKF | seqid_500 |
| variant_634 | RWKKFLKIPPKFKKAALKF | seqid_501 |
| variant_635 | FWKKFLKIPPKFKKAALKF | seqid_502 |
| variant_636 | KKKLLLKIPPKFKKAALKF | seqid_503 |
| variant_637 | RKKLLLKIPPKFKKAALKF | seqid_504 |
| variant_638 | FKKLLLKIPPKFKKAALKF | seqid_505 |
| variant_639 | KWKLLLKIPPKFKKAALKF | seqid_506 |
| variant_640 | RWKLLLKIPPKFKKAALKF | seqid_507 |
| variant_641 | FWKLLLKIPPKFKKAALKF | seqid_508 |
| variant_642 | KKKKLLKIPPKFKKAALKF | seqid_509 |
| variant_643 | RKKKLLKIPPKFKKAALKF | seqid_510 |
| variant_644 | FKKKLLKIPPKFKKAALKF | seqid_511 |
| variant_645 | KWKKLLKIPPKFKKAALKF | seqid_512 |
| variant_646 | RWKKLLKIPPKFKKAALKF | seqid_513 |
| variant_647 | FWKKLLKIPPKFKKAALKF | seqid_514 |
| variant_648 | KKKLFKKIPPKFKKAALKF | seqid_515 |
| variant_649 | RKKLFKKIPPKFKKAALKF | seqid_516 |
| variant_650 | FKKLFKKIPPKFKKAALKF | seqid_517 |
| variant_651 | KWKLFKKIPPKFKKAALKF | seqid_518 |
| variant_652 | RWKLFKKIPPKFKKAALKF | seqid_519 |
| variant_653 | FWKLFKKIPPKFKKAALKF | seqid_520 |
| variant_654 | KKKKFKKIPPKFKKAALKF | seqid_521 |
| variant_655 | RKKKFKKIPPKFKKAALKF | seqid_522 |
| variant_656 | FKKKFKKIPPKFKKAALKF | seqid_523 |
| variant_657 | KWKKFKKIPPKFKKAALKF | seqid_524 |
| variant_658 | RWKKFKKIPPKFKKAALKF | seqid_525 |
| variant_659 | FWKKFKKIPPKFKKAALKF | seqid_526 |
| variant_660 | KKKLLKKIPPKFKKAALKF | seqid_527 |
| variant_661 | RKKLLKKIPPKFKKAALKF | seqid_528 |
| variant_662 | FKKLLKKIPPKFKKAALKF | seqid_529 |
| variant_663 | KWKLLKKIPPKFKKAALKF | seqid_530 |
| variant_664 | RWKLLKKIPPKFKKAALKF | seqid_531 |
| variant_665 | FWKLLKKIPPKFKKAALKF | seqid_532 |
| variant_666 | KKKKLKKIPPKFKKAALKF | seqid_533 |
| variant_667 | RKKKLKKIPPKFKKAALKF | seqid_534 |
| variant_668 | FKKKLKKIPPKFKKAALKF | seqid_535 |
| variant_669 | KWKKLKKIPPKFKKAALKF | seqid_536 |
| variant_670 | RWKKLKKIPPKFKKAALKF | seqid_537 |
| variant_671 | FWKKLKKIPPKFKKAALKF | seqid_538 |
| variant_720 | KKKLFLKIPKFKKAALKF | seqid_539 |
| variant_721 | RKKLFLKIPKFKKAALKF | seqid_540 |
| variant_722 | FKKLFLKIPKFKKAALKF | seqid_541 |
| variant_723 | KWKLFLKIPKFKKAALKF | seqid_542 |
| variant_724 | RWKLFLKIPKFKKAALKF | seqid_543 |
| variant_725 | FWKLFLKIPKFKKAALKF | seqid_544 |
| variant_726 | KKKKFLKIPKFKKAALKF | seqid_545 |
| variant_727 | RKKKFLKIPKFKKAALKF | seqid_546 |
| variant_728 | FKKKFLKIPKFKKAALKF | seqid_547 |
| variant_729 | KWKKFLKIPKFKKAALKF | seqid_548 |
| variant_730 | RWKKFLKIPKFKKAALKF | seqid_549 |
| variant_731 | FWKKFLKIPKFKKAALKF | seqid_550 |
| variant_732 | KKKLLLKIPKFKKAALKF | seqid_551 |
| variant_733 | RKKLLLKIPKFKKAALKF | seqid_552 |
| variant_734 | FKKLLLKIPKFKKAALKF | seqid_553 |
| variant_735 | KWKLLLKIPKFKKAALKF | seqid_554 |
| variant_736 | RWKLLLKIPKFKKAALKF | seqid_555 |
| variant_737 | FWKLLLKIPKFKKAALKF | seqid_556 |
| variant_738 | KKKKLLKIPKFKKAALKF | seqid_557 |
| variant_739 | RKKKLLKIPKFKKAALKF | seqid_558 |
| variant_740 | FKKKLLKIPKFKKAALKF | seqid_559 |
| variant_741 | KWKKLLKIPKFKKAALKF | seqid_560 |
| variant_742 | RWKKLLKIPKFKKAALKF | seqid_561 |
| variant_743 | FWKKLLKIPKFKKAALKF | seqid_562 |
| variant_744 | KKKLFKKIPKFKKAALKF | seqid_563 |
| variant_745 | RKKLFKKIPKFKKAALKF | seqid_564 |
| variant_746 | FKKLFKKIPKFKKAALKF | seqid_565 |
| variant_747 | KWKLFKKIPKFKKAALKF | seqid_566 |
| variant_748 | RWKLFKKIPKFKKAALKF | seqid_567 |
| variant_749 | FWKLFKKIPKFKKAALKF | seqid_568 |
| variant_750 | KKKKFKKIPKFKKAALKF | seqid_569 |
| variant_751 | RKKKFKKIPKFKKAALKF | seqid_570 |
| variant_752 | FKKKFKKIPKFKKAALKF | seqid_571 |
| variant_753 | KWKKFKKIPKFKKAALKF | seqid_572 |
| variant_754 | RWKKFKKIPKFKKAALKF | seqid_573 |
| variant_755 | FWKKFKKIPKFKKAALKF | seqid_574 |
| variant_756 | KKKLLKKIPKFKKAALKF | seqid_575 |
| variant_757 | RKKLLKKIPKFKKAALKF | seqid_576 |
| variant_758 | FKKLLKKIPKFKKAALKF | seqid_577 |
| variant_759 | KWKLLKKIPKFKKAALKF | seqid_578 |
| variant_760 | RWKLLKKIPKFKKAALKF | seqid_579 |
| variant_761 | FWKLLKKIPKFKKAALKF | seqid_580 |
| variant_762 | KKKKLKKIPKFKKAALKF | seqid_581 |
| variant_763 | RKKKLKKIPKFKKAALKF | seqid_582 |
| variant_764 | FKKKLKKIPKFKKAALKF | seqid_583 |
| variant_765 | KWKKLKKIPKFKKAALKF | seqid_584 |
| variant_766 | RWKKLKKIPKFKKAALKF | seqid_585 |
| variant_767 | FWKKLKKIPKFKKAALKF | seqid_586 |
| variant_768 | KKKLFLKIPPPKFLHLALKF | seqid_587 |
| variant_769 | RKKLFLKIPPPKFLHLALKF | seqid_588 |
| variant_770 | FKKLFLKIPPPKFLHLALKF | seqid_589 |
| variant_771 | KWKLFLKIPPPKFLHLALKF | seqid_590 |
| variant_772 | RWKLFLKIPPPKFLHLALKF | seqid_591 |
| variant_773 | FWKLFLKIPPPKFLHLALKF | seqid_592 |
| variant_774 | KKKKFLKIPPPKFLHLALKF | seqid_593 |
| variant_775 | RKKKFLKIPPPKFLHLALKF | seqid_594 |
| variant_776 | FKKKFLKIPPPKFLHLALKF | seqid_595 |
| variant_777 | KWKKFLKIPPPKFLHLALKF | seqid_596 |
| variant_778 | RWKKFLKIPPPKFLHLALKF | seqid_597 |
| variant_779 | FWKKFLKIPPPKFLHLALKF | seqid_598 |
| variant_780 | KKKLLLKIPPPKFLHLALKF | seqid_599 |
| variant_781 | RKKLLLKIPPPKFLHLALKF | seqid_600 |
| variant_782 | FKKLLLKIPPPKFLHLALKF | seqid_601 |
| variant_783 | KWKLLLKIPPPKFLHLALKF | seqid_602 |
| variant_784 | RWKLLLKIPPPKFLHLALKF | seqid_603 |
| variant_785 | FWKLLLKIPPPKFLHLALKF | seqid_604 |
| variant_786 | KKKKLLKIPPPKFLHLALKF | seqid_605 |
| variant_787 | RKKKLLKIPPPKFLHLALKF | seqid_606 |
| variant_788 | FKKKLLKIPPPKFLHLALKF | seqid_607 |
| variant_789 | KWKKLLKIPPPKFLHLALKF | seqid_608 |
| variant_790 | RWKKLLKIPPPKFLHLALKF | seqid_609 |
| variant_791 | FWKKLLKIPPPKFLHLALKF | seqid_610 |
| variant_792 | KKKLFKKIPPPKFLHLALKF | seqid_611 |
| variant_793 | RKKLFKKIPPPKFLHLALKF | seqid_612 |
| variant_794 | FKKLFKKIPPPKFLHLALKF | seqid_613 |
| variant_795 | KWKLFKKIPPPKFLHLALKF | seqid_614 |
| variant_796 | RWKLFKKIPPPKFLHLALKF | seqid_615 |
| variant_797 | FWKLFKKIPPPKFLHLALKF | seqid_616 |
| variant_798 | KKKKFKKIPPPKFLHLALKF | seqid_617 |
| variant_799 | RKKKFKKIPPPKFLHLALKF | seqid_618 |
| variant_800 | FKKKFKKIPPPKFLHLALKF | seqid_619 |
| variant_801 | KWKKFKKIPPPKFLHLALKF | seqid_620 |
| variant_802 | RWKKFKKIPPPKFLHLALKF | seqid_621 |
| variant_803 | FWKKFKKIPPPKFLHLALKF | seqid_622 |
| variant_804 | KKKLLKKIPPPKFLHLALKF | seqid_623 |
| variant_805 | RKKLLKKIPPPKFLHLALKF | seqid_624 |
| variant_806 | FKKLLKKIPPPKFLHLALKF | seqid_625 |
| variant_807 | KWKLLKKIPPPKFLHLALKF | seqid_626 |
| variant_808 | RWKLLKKIPPPKFLHLALKF | seqid_627 |
| variant_809 | FWKLLKKIPPPKFLHLALKF | seqid_628 |
| variant_810 | KKKKLKKIPPPKFLHLALKF | seqid_629 |
| variant_811 | RKKKLKKIPPPKFLHLALKF | seqid_630 |
| variant_812 | FKKKLKKIPPPKFLHLALKF | seqid_631 |
| variant_813 | KWKKLKKIPPPKFLHLALKF | seqid_632 |
| variant_814 | RWKKLKKIPPPKFLHLALKF | seqid_633 |
| variant_815 | FWKKLKKIPPPKFLHLALKF | seqid_634 |
| variant_816 | KKKLFLKIPPKFLHLALKF | seqid_635 |
| variant_817 | RKKLFLKIPPKFLHLALKF | seqid_636 |
| variant_818 | FKKLFLKIPPKFLHLALKF | seqid_637 |
| variant_819 | KWKLFLKIPPKFLHLALKF | seqid_638 |
| variant_820 | RWKLFLKIPPKFLHLALKF | seqid_639 |
| variant_821 | FWKLFLKIPPKFLHLALKF | seqid_640 |
| variant_822 | KKKKFLKIPPKFLHLALKF | seqid_641 |
| variant_823 | RKKKFLKIPPKFLHLALKF | seqid_642 |
| variant_824 | FKKKFLKIPPKFLHLALKF | seqid_643 |
| variant_825 | KWKKFLKIPPKFLHLALKF | seqid_644 |
| variant_826 | RWKKFLKIPPKFLHLALKF | seqid_645 |
| variant_827 | FWKKFLKIPPKFLHLALKF | seqid_646 |
| variant_828 | KKKLLLKIPPKFLHLALKF | seqid_647 |
| variant_829 | RKKLLLKIPPKFLHLALKF | seqid_648 |
| variant_830 | FKKLLLKIPPKFLHLALKF | seqid_649 |
| variant_831 | KWKLLLKIPPKFLHLALKF | seqid_650 |
| variant_832 | RWKLLLKIPPKFLHLALKF | seqid_651 |
| variant_833 | FWKLLLKIPPKFLHLALKF | seqid_652 |
| variant_834 | KKKKLLKIPPKFLHLALKF | seqid_653 |
| variant_835 | RKKKLLKIPPKFLHLALKF | seqid_654 |
| variant_836 | FKKKLLKIPPKFLHLALKF | seqid_655 |
| variant_837 | KWKKLLKIPPKFLHLALKF | seqid_656 |
| variant_838 | RWKKLLKIPPKFLHLALKF | seqid_657 |
| variant_839 | FWKKLLKIPPKFLHLALKF | seqid_658 |
| variant_840 | KKKLFKKIPPKFLHLALKF | seqid_659 |
| variant_841 | RKKLFKKIPPKFLHLALKF | seqid_660 |
| variant_842 | FKKLFKKIPPKFLHLALKF | seqid_661 |
| variant_843 | KWKLFKKIPPKFLHLALKF | seqid_662 |
| variant_844 | RWKLFKKIPPKFLHLALKF | seqid_663 |
| variant_845 | FWKLFKKIPPKFLHLALKF | seqid_664 |
| variant_846 | KKKKFKKIPPKFLHLALKF | seqid_665 |
| variant_847 | RKKKFKKIPPKFLHLALKF | seqid_666 |
| variant_848 | FKKKFKKIPPKFLHLALKF | seqid_667 |
| variant_849 | KWKKFKKIPPKFLHLALKF | seqid_668 |
| variant_850 | RWKKFKKIPPKFLHLALKF | seqid_669 |
| variant_851 | FWKKFKKIPPKFLHLALKF | seqid_670 |
| variant_852 | KKKLLKKIPPKFLHLALKF | seqid_671 |
| variant_853 | RKKLLKKIPPKFLHLALKF | seqid_672 |
| variant_854 | FKKLLKKIPPKFLHLALKF | seqid_673 |
| variant_855 | KWKLLKKIPPKFLHLALKF | seqid_674 |
| variant_856 | RWKLLKKIPPKFLHLALKF | seqid_675 |
| variant_857 | FWKLLKKIPPKFLHLALKF | seqid_676 |
| variant_858 | KKKKLKKIPPKFLHLALKF | seqid_677 |
| variant_859 | RKKKLKKIPPKFLHLALKF | seqid_678 |
| variant_860 | FKKKLKKIPPKFLHLALKF | seqid_679 |
| variant_861 | KWKKLKKIPPKFLHLALKF | seqid_680 |
| variant_862 | RWKKLKKIPPKFLHLALKF | seqid_681 |
| variant_863 | FWKKLKKIPPKFLHLALKF | seqid_682 |
| variant_912 | KKKLFLKIPKFLHLALKF | seqid_683 |
| variant_913 | RKKLFLKIPKFLHLALKF | seqid_684 |
| variant_914 | FKKLFLKIPKFLHLALKF | seqid_685 |
| variant_915 | KWKLFLKIPKFLHLALKF | seqid_686 |
| variant_916 | RWKLFLKIPKFLHLALKF | seqid_687 |
| variant_917 | FWKLFLKIPKFLHLALKF | seqid_688 |
| variant_918 | KKKKFLKIPKFLHLALKF | seqid_689 |
| variant_919 | RKKKFLKIPKFLHLALKF | seqid_690 |
| variant_920 | FKKKFLKIPKFLHLALKF | seqid_691 |
| variant_921 | KWKKFLKIPKFLHLALKF | seqid_692 |
| variant_922 | RWKKFLKIPKFLHLALKF | seqid_693 |
| variant_923 | FWKKFLKIPKFLHLALKF | seqid_694 |
| variant_924 | KKKLLLKIPKFLHLALKF | seqid_695 |
| variant_925 | RKKLLLKIPKFLHLALKF | seqid_696 |
| variant_926 | FKKLLLKIPKFLHLALKF | seqid_697 |
| variant_927 | KWKLLLKIPKFLHLALKF | seqid_698 |
| variant_928 | RWKLLLKIPKFLHLALKF | seqid_699 |
| variant_929 | FWKLLLKIPKFLHLALKF | seqid_700 |
| variant_930 | KKKKLLKIPKFLHLALKF | seqid_701 |
| variant_931 | RKKKLLKIPKFLHLALKF | seqid_702 |
| variant_932 | FKKKLLKIPKFLHLALKF | seqid_703 |
| variant_933 | KWKKLLKIPKFLHLALKF | seqid_704 |
| variant_934 | RWKKLLKIPKFLHLALKF | seqid_705 |
| variant_935 | FWKKLLKIPKFLHLALKF | seqid_706 |
| variant_936 | KKKLFKKIPKFLHLALKF | seqid_707 |
| variant_937 | RKKLFKKIPKFLHLALKF | seqid_708 |
| variant_938 | FKKLFKKIPKFLHLALKF | seqid_709 |
| variant_939 | KWKLFKKIPKFLHLALKF | seqid_710 |
| variant_940 | RWKLFKKIPKFLHLALKF | seqid_711 |
| variant_941 | FWKLFKKIPKFLHLALKF | seqid_712 |
| variant_942 | KKKKFKKIPKFLHLALKF | seqid_713 |
| variant_943 | RKKKFKKIPKFLHLALKF | seqid_714 |
| variant_944 | FKKKFKKIPKFLHLALKF | seqid_715 |
| variant_945 | KWKKFKKIPKFLHLALKF | seqid_716 |
| variant_946 | RWKKFKKIPKFLHLALKF | seqid_717 |
| variant_947 | FWKKFKKIPKFLHLALKF | seqid_718 |
| variant_948 | KKKLLKKIPKFLHLALKF | seqid_719 |
| variant_949 | RKKLLKKIPKFLHLALKF | seqid_720 |
| variant_950 | FKKLLKKIPKFLHLALKF | seqid_721 |
| variant_951 | KWKLLKKIPKFLHLALKF | seqid_722 |
| variant_952 | RWKLLKKIPKFLHLALKF | seqid_723 |
| variant_953 | FWKLLKKIPKFLHLALKF | seqid_724 |
| variant_954 | KKKKLKKIPKFLHLALKF | seqid_725 |
| variant_955 | RKKKLKKIPKFLHLALKF | seqid_726 |
| variant_956 | FKKKLKKIPKFLHLALKF | seqid_727 |
| variant_957 | KWKKLKKIPKFLHLALKF | seqid_728 |
| variant_958 | RWKKLKKIPKFLHLALKF | seqid_729 |
| variant_959 | FWKKLKKIPKFLHLALKF | seqid_730 |
| variant_960 | KKKLFLKIPPPKFKHLALKF | seqid_731 |
| variant_961 | RKKLFLKIPPPKFKHLALKF | seqid_732 |
| variant_962 | FKKLFLKIPPPKFKHLALKF | seqid_733 |
| variant_963 | KWKLFLKIPPPKFKHLALKF | seqid_734 |
| variant_964 | RWKLFLKIPPPKFKHLALKF | seqid_735 |
| variant_965 | FWKLFLKIPPPKFKHLALKF | seqid_736 |
| variant_966 | KKKKFLKIPPPKFKHLALKF | seqid_737 |
| variant_967 | RKKKFLKIPPPKFKHLALKF | seqid_738 |
| variant_968 | FKKKFLKIPPPKFKHLALKF | seqid_739 |
| variant_969 | KWKKFLKIPPPKFKHLALKF | seqid_740 |
| variant_970 | RWKKFLKIPPPKFKHLALKF | seqid_741 |
| variant_971 | FWKKFLKIPPPKFKHLALKF | seqid_742 |
| variant_972 | KKKLLLKIPPPKFKHLALKF | seqid_743 |
| variant_973 | RKKLLLKIPPPKFKHLALKF | seqid_744 |
| variant_974 | FKKLLLKIPPPKFKHLALKF | seqid_745 |
| variant_975 | KWKLLLKIPPPKFKHLALKF | seqid_746 |
| variant_976 | RWKLLLKIPPPKFKHLALKF | seqid_747 |
| variant_977 | FWKLLLKIPPPKFKHLALKF | seqid_748 |
| variant_978 | KKKKLLKIPPPKFKHLALKF | seqid_749 |
| variant_979 | RKKKLLKIPPPKFKHLALKF | seqid_750 |
| variant_980 | FKKKLLKIPPPKFKHLALKF | seqid_751 |
| variant_981 | KWKKLLKIPPPKFKHLALKF | seqid_752 |
| variant_982 | RWKKLLKIPPPKFKHLALKF | seqid_753 |
| variant_983 | FWKKLLKIPPPKFKHLALKF | seqid_754 |
| variant_984 | KKKLFKKIPPPKFKHLALKF | seqid_755 |
| variant_985 | RKKLFKKIPPPKFKHLALKF | seqid_756 |
| variant_986 | FKKLFKKIPPPKFKHLALKF | seqid_757 |
| variant_987 | KWKLFKKIPPPKFKHLALKF | seqid_758 |
| variant_988 | RWKLFKKIPPPKFKHLALKF | seqid_759 |
| variant_989 | FWKLFKKIPPPKFKHLALKF | seqid_760 |
| variant_990 | KKKKFKKIPPPKFKHLALKF | seqid_761 |
| variant_991 | RKKKFKKIPPPKFKHLALKF | seqid_762 |
| variant_992 | FKKKFKKIPPPKFKHLALKF | seqid_763 |
| variant_993 | KWKKFKKIPPPKFKHLALKF | seqid_764 |
| variant_994 | RWKKFKKIPPPKFKHLALKF | seqid_765 |
| variant_995 | FWKKFKKIPPPKFKHLALKF | seqid_766 |
| variant_996 | KKKLLKKIPPPKFKHLALKF | seqid_767 |
| variant_997 | RKKLLKKIPPPKFKHLALKF | seqid_768 |
| variant_998 | FKKLLKKIPPPKFKHLALKF | seqid_769 |
| variant_999 | KWKLLKKIPPPKFKHLALKF | seqid_770 |
| variant_1000 | RWKLLKKIPPPKFKHLALKF | seqid_771 |
| variant_1001 | FWKLLKKIPPPKFKHLALKF | seqid_772 |
| variant_1002 | KKKKLKKIPPPKFKHLALKF | seqid_773 |
| variant_1003 | RKKKLKKIPPPKFKHLALKF | seqid_774 |
| variant_1004 | FKKKLKKIPPPKFKHLALKF | seqid_775 |
| variant_1005 | KWKKLKKIPPPKFKHLALKF | seqid_776 |
| variant_1006 | RWKKLKKIPPPKFKHLALKF | seqid_777 |
| variant_1007 | FWKKLKKIPPPKFKHLALKF | seqid_778 |
| variant_1008 | KKKLFLKIPPKFKHLALKF | seqid_779 |
| variant_1009 | RKKLFLKIPPKFKHLALKF | seqid_780 |
| variant_1010 | FKKLFLKIPPKFKHLALKF | seqid_781 |
| variant_1011 | KWKLFLKIPPKFKHLALKF | seqid_782 |
| variant_1012 | RWKLFLKIPPKFKHLALKF | seqid_783 |
| variant_1013 | FWKLFLKIPPKFKHLALKF | seqid_784 |
| variant_1014 | KKKKFLKIPPKFKHLALKF | seqid_785 |
| variant_1015 | RKKKFLKIPPKFKHLALKF | seqid_786 |
| variant_1016 | FKKKFLKIPPKFKHLALKF | seqid_787 |
| variant_1017 | KWKKFLKIPPKFKHLALKF | seqid_788 |
| variant_1018 | RWKKFLKIPPKFKHLALKF | seqid_789 |
| variant_1019 | FWKKFLKIPPKFKHLALKF | seqid_790 |
| variant_1020 | KKKLLLKIPPKFKHLALKF | seqid_791 |
| variant_1021 | RKKLLLKIPPKFKHLALKF | seqid_792 |
| variant_1022 | FKKLLLKIPPKFKHLALKF | seqid_793 |
| variant_1023 | KWKLLLKIPPKFKHLALKF | seqid_794 |
| variant_1024 | RWKLLLKIPPKFKHLALKF | seqid_795 |
| variant_1025 | FWKLLLKIPPKFKHLALKF | seqid_796 |
| variant_1026 | KKKKLLKIPPKFKHLALKF | seqid_797 |
| variant_1027 | RKKKLLKIPPKFKHLALKF | seqid_798 |
| variant_1028 | FKKKLLKIPPKFKHLALKF | seqid_799 |
| variant_1029 | KWKKLLKIPPKFKHLALKF | seqid_800 |
| variant_1030 | RWKKLLKIPPKFKHLALKF | seqid_801 |
| variant_1031 | FWKKLLKIPPKFKHLALKF | seqid_802 |
| variant_1032 | KKKLFKKIPPKFKHLALKF | seqid_803 |
| variant_1033 | RKKLFKKIPPKFKHLALKF | seqid_804 |
| variant_1034 | FKKLFKKIPPKFKHLALKF | seqid_805 |
| variant_1035 | KWKLFKKIPPKFKHLALKF | seqid_806 |
| variant_1036 | RWKLFKKIPPKFKHLALKF | seqid_807 |
| variant_1037 | FWKLFKKIPPKFKHLALKF | seqid_808 |
| variant_1038 | KKKKFKKIPPKFKHLALKF | seqid_809 |
| variant_1039 | RKKKFKKIPPKFKHLALKF | seqid_810 |
| variant_1040 | FKKKFKKIPPKFKHLALKF | seqid_811 |
| variant_1041 | KWKKFKKIPPKFKHLALKF | seqid_812 |
| variant_1042 | RWKKFKKIPPKFKHLALKF | seqid_813 |
| variant_1043 | FWKKFKKIPPKFKHLALKF | seqid_814 |
| variant_1044 | KKKLLKKIPPKFKHLALKF | seqid_815 |
| variant_1045 | RKKLLKKIPPKFKHLALKF | seqid_816 |
| variant_1046 | FKKLLKKIPPKFKHLALKF | seqid_817 |
| variant_1047 | KWKLLKKIPPKFKHLALKF | seqid_818 |
| variant_1048 | RWKLLKKIPPKFKHLALKF | seqid_819 |
| variant_1049 | FWKLLKKIPPKFKHLALKF | seqid_820 |
| variant_1050 | KKKKLKKIPPKFKHLALKF | seqid_821 |
| variant_1051 | RKKKLKKIPPKFKHLALKF | seqid_822 |
| variant_1052 | FKKKLKKIPPKFKHLALKF | seqid_823 |
| variant_1053 | KWKKLKKIPPKFKHLALKF | seqid_824 |
| variant_1054 | RWKKLKKIPPKFKHLALKF | seqid_825 |
| variant_1055 | FWKKLKKIPPKFKHLALKF | seqid_826 |
| variant_1104 | KKKLFLKIPKFKHLALKF | seqid_827 |
| variant_1105 | RKKLFLKIPKFKHLALKF | seqid_828 |
| variant_1106 | FKKLFLKIPKFKHLALKF | seqid_829 |
| variant_1107 | KWKLFLKIPKFKHLALKF | seqid_830 |
| variant_1108 | RWKLFLKIPKFKHLALKF | seqid_831 |
| variant_1109 | FWKLFLKIPKFKHLALKF | seqid_832 |
| variant_1110 | KKKKFLKIPKFKHLALKF | seqid_833 |
| variant_1111 | RKKKFLKIPKFKHLALKF | seqid_834 |
| variant_1112 | FKKKFLKIPKFKHLALKF | seqid_835 |
| variant_1113 | KWKKFLKIPKFKHLALKF | seqid_836 |
| variant_1114 | RWKKFLKIPKFKHLALKF | seqid_837 |
| variant_1115 | FWKKFLKIPKFKHLALKF | seqid_838 |
| variant_1116 | KKKLLLKIPKFKHLALKF | seqid_839 |
| variant_1117 | RKKLLLKIPKFKHLALKF | seqid_840 |
| variant_1118 | FKKLLLKIPKFKHLALKF | seqid_841 |
| variant_1119 | KWKLLLKIPKFKHLALKF | seqid_842 |
| variant_1120 | RWKLLLKIPKFKHLALKF | seqid_843 |
| variant_1121 | FWKLLLKIPKFKHLALKF | seqid_844 |
| variant_1122 | KKKKLLKIPKFKHLALKF | seqid_845 |
| variant_1123 | RKKKLLKIPKFKHLALKF | seqid_846 |
| variant_1124 | FKKKLLKIPKFKHLALKF | seqid_847 |
| variant_1125 | KWKKLLKIPKFKHLALKF | seqid_848 |
| variant_1126 | RWKKLLKIPKFKHLALKF | seqid_849 |
| variant_1127 | FWKKLLKIPKFKHLALKF | seqid_850 |
| variant_1128 | KKKLFKKIPKFKHLALKF | seqid_851 |
| variant_1129 | RKKLFKKIPKFKHLALKF | seqid_852 |
| variant_1130 | FKKLFKKIPKFKHLALKF | seqid_853 |
| variant_1131 | KWKLFKKIPKFKHLALKF | seqid_854 |
| variant_1132 | RWKLFKKIPKFKHLALKF | seqid_855 |
| variant_1133 | FWKLFKKIPKFKHLALKF | seqid_856 |
| variant_1134 | KKKKFKKIPKFKHLALKF | seqid_857 |
| variant_1135 | RKKKFKKIPKFKHLALKF | seqid_858 |
| variant_1136 | FKKKFKKIPKFKHLALKF | seqid_859 |
| variant_1137 | KWKKFKKIPKFKHLALKF | seqid_860 |
| variant_1138 | RWKKFKKIPKFKHLALKF | seqid_861 |
| variant_1139 | FWKKFKKIPKFKHLALKF | seqid_862 |
| variant_1140 | KKKLLKKIPKFKHLALKF | seqid_863 |
| variant_1141 | RKKLLKKIPKFKHLALKF | seqid_864 |
| variant_1142 | FKKLLKKIPKFKHLALKF | seqid_865 |
| variant_1143 | KWKLLKKIPKFKHLALKF | seqid_866 |
| variant_1144 | RWKLLKKIPKFKHLALKF | seqid_867 |
| variant_1145 | FWKLLKKIPKFKHLALKF | seqid_868 |
| variant_1146 | KKKKLKKIPKFKHLALKF | seqid_869 |
| variant_1147 | RKKKLKKIPKFKHLALKF | seqid_870 |
| variant_1148 | FKKKLKKIPKFKHLALKF | seqid_871 |
| variant_1149 | KWKKLKKIPKFKHLALKF | seqid_872 |
| variant_1150 | RWKKLKKIPKFKHLALKF | seqid_873 |
| variant_1151 | FWKKLKKIPKFKHLALKF | seqid_874 |
| variant_1152 | KKKLFLKIPPPKFLKLALKF | seqid_875 |
| variant_1153 | RKKLFLKIPPPKFLKLALKF | seqid_876 |
| variant_1154 | FKKLFLKIPPPKFLKLALKF | seqid_877 |
| variant_1155 | KWKLFLKIPPPKFLKLALKF | seqid_878 |
| variant_1156 | RWKLFLKIPPPKFLKLALKF | seqid_879 |
| variant_1157 | FWKLFLKIPPPKFLKLALKF | seqid_880 |
| variant_1158 | KKKKFLKIPPPKFLKLALKF | seqid_881 |
| variant_1159 | RKKKFLKIPPPKFLKLALKF | seqid_882 |
| variant_1160 | FKKKFLKIPPPKFLKLALKF | seqid_883 |
| variant_1161 | KWKKFLKIPPPKFLKLALKF | seqid_884 |
| variant_1162 | RWKKFLKIPPPKFLKLALKF | seqid_885 |
| variant_1163 | FWKKFLKIPPPKFLKLALKF | seqid_886 |
| variant_1164 | KKKLLLKIPPPKFLKLALKF | seqid_887 |
| variant_1165 | RKKLLLKIPPPKFLKLALKF | seqid_888 |
| variant_1166 | FKKLLLKIPPPKFLKLALKF | seqid_889 |
| variant_1167 | KWKLLLKIPPPKFLKLALKF | seqid_890 |
| variant_1168 | RWKLLLKIPPPKFLKLALKF | seqid_891 |
| variant_1169 | FWKLLLKIPPPKFLKLALKF | seqid_892 |
| variant_1170 | KKKKLLKIPPPKFLKLALKF | seqid_893 |
| variant_1171 | RKKKLLKIPPPKFLKLALKF | seqid_894 |
| variant_1172 | FKKKLLKIPPPKFLKLALKF | seqid_895 |
| variant_1173 | KWKKLLKIPPPKFLKLALKF | seqid_896 |
| variant_1174 | RWKKLLKIPPPKFLKLALKF | seqid_897 |
| variant_1175 | FWKKLLKIPPPKFLKLALKF | seqid_898 |
| variant_1176 | KKKLFKKIPPPKFLKLALKF | seqid_899 |
| variant_1177 | RKKLFKKIPPPKFLKLALKF | seqid_900 |
| variant_1178 | FKKLFKKIPPPKFLKLALKF | seqid_901 |
| variant_1179 | KWKLFKKIPPPKFLKLALKF | seqid_902 |
| variant_1180 | RWKLFKKIPPPKFLKLALKF | seqid_903 |
| variant_1181 | FWKLFKKIPPPKFLKLALKF | seqid_904 |
| variant_1182 | KKKKFKKIPPPKFLKLALKF | seqid_905 |
| variant_1183 | RKKKFKKIPPPKFLKLALKF | seqid_906 |
| variant_1184 | FKKKFKKIPPPKFLKLALKF | seqid_907 |
| variant_1185 | KWKKFKKIPPPKFLKLALKF | seqid_908 |
| variant_1186 | RWKKFKKIPPPKFLKLALKF | seqid_909 |
| variant_1187 | FWKKFKKIPPPKFLKLALKF | seqid_910 |
| variant_1188 | KKKLLKKIPPPKFLKLALKF | seqid_911 |
| variant_1189 | RKKLLKKIPPPKFLKLALKF | seqid_912 |
| variant_1190 | FKKLLKKIPPPKFLKLALKF | seqid_913 |
| variant_1191 | KWKLLKKIPPPKFLKLALKF | seqid_914 |
| variant_1192 | RWKLLKKIPPPKFLKLALKF | seqid_915 |
| variant_1193 | FWKLLKKIPPPKFLKLALKF | seqid_916 |
| variant_1194 | KKKKLKKIPPPKFLKLALKF | seqid_917 |
| variant_1195 | RKKKLKKIPPPKFLKLALKF | seqid_918 |
| variant_1196 | FKKKLKKIPPPKFLKLALKF | seqid_919 |
| variant_1197 | KWKKLKKIPPPKFLKLALKF | seqid_920 |
| variant_1198 | RWKKLKKIPPPKFLKLALKF | seqid_921 |
| variant_1199 | FWKKLKKIPPPKFLKLALKF | seqid_922 |
| variant_1200 | KKKLFLKIPPKFLKLALKF | seqid_923 |
| variant_1201 | RKKLFLKIPPKFLKLALKF | seqid_924 |
| variant_1202 | FKKLFLKIPPKFLKLALKF | seqid_925 |
| variant_1203 | KWKLFLKIPPKFLKLALKF | seqid_926 |
| variant_1204 | RWKLFLKIPPKFLKLALKF | seqid_927 |
| variant_1205 | FWKLFLKIPPKFLKLALKF | seqid_928 |
| variant_1206 | KKKKFLKIPPKFLKLALKF | seqid_929 |
| variant_1207 | RKKKFLKIPPKFLKLALKF | seqid_930 |
| variant_1208 | FKKKFLKIPPKFLKLALKF | seqid_931 |
| variant_1209 | KWKKFLKIPPKFLKLALKF | seqid_932 |
| variant_1210 | RWKKFLKIPPKFLKLALKF | seqid_933 |
| variant_1211 | FWKKFLKIPPKFLKLALKF | seqid_934 |
| variant_1212 | KKKLLLKIPPKFLKLALKF | seqid_935 |
| variant_1213 | RKKLLLKIPPKFLKLALKF | seqid_936 |
| variant_1214 | FKKLLLKIPPKFLKLALKF | seqid_937 |
| variant_1215 | KWKLLLKIPPKFLKLALKF | seqid_938 |
| variant_1216 | RWKLLLKIPPKFLKLALKF | seqid_939 |
| variant_1217 | FWKLLLKIPPKFLKLALKF | seqid_940 |
| variant_1218 | KKKKLLKIPPKFLKLALKF | seqid_941 |
| variant_1219 | RKKKLLKIPPKFLKLALKF | seqid_942 |
| variant_1220 | FKKKLLKIPPKFLKLALKF | seqid_943 |
| variant_1221 | KWKKLLKIPPKFLKLALKF | seqid_944 |
| variant_1222 | RWKKLLKIPPKFLKLALKF | seqid_945 |
| variant_1223 | FWKKLLKIPPKFLKLALKF | seqid_946 |
| variant_1224 | KKKLFKKIPPKFLKLALKF | seqid_947 |
| variant_1225 | RKKLFKKIPPKFLKLALKF | seqid_948 |
| variant_1226 | FKKLFKKIPPKFLKLALKF | seqid_949 |
| variant_1227 | KWKLFKKIPPKFLKLALKF | seqid_950 |
| variant_1228 | RWKLFKKIPPKFLKLALKF | seqid_951 |
| variant_1229 | FWKLFKKIPPKFLKLALKF | seqid_952 |
| variant_1230 | KKKKFKKIPPKFLKLALKF | seqid_953 |
| variant_1231 | RKKKFKKIPPKFLKLALKF | seqid_954 |
| variant_1232 | FKKKFKKIPPKFLKLALKF | seqid_955 |
| variant_1233 | KWKKFKKIPPKFLKLALKF | seqid_956 |
| variant_1234 | RWKKFKKIPPKFLKLALKF | seqid_957 |
| variant_1235 | FWKKFKKIPPKFLKLALKF | seqid_958 |
| variant_1236 | KKKLLKKIPPKFLKLALKF | seqid_959 |
| variant_1237 | RKKLLKKIPPKFLKLALKF | seqid_960 |
| variant_1238 | FKKLLKKIPPKFLKLALKF | seqid_961 |
| variant_1239 | KWKLLKKIPPKFLKLALKF | seqid_962 |
| variant_1240 | RWKLLKKIPPKFLKLALKF | seqid_963 |
| variant_1241 | FWKLLKKIPPKFLKLALKF | seqid_964 |
| variant_1242 | KKKKLKKIPPKFLKLALKF | seqid_965 |
| variant_1243 | RKKKLKKIPPKFLKLALKF | seqid_966 |
| variant_1244 | FKKKLKKIPPKFLKLALKF | seqid_967 |
| variant_1245 | KWKKLKKIPPKFLKLALKF | seqid_968 |
| variant_1246 | RWKKLKKIPPKFLKLALKF | seqid_969 |
| variant_1247 | FWKKLKKIPPKFLKLALKF | seqid_970 |
| variant_1296 | KKKLFLKIPKFLKLALKF | seqid_971 |
| variant_1297 | RKKLFLKIPKFLKLALKF | seqid_972 |
| variant_1298 | FKKLFLKIPKFLKLALKF | seqid_973 |
| variant_1299 | KWKLFLKIPKFLKLALKF | seqid_974 |
| variant_1300 | RWKLFLKIPKFLKLALKF | seqid_975 |
| variant_1301 | FWKLFLKIPKFLKLALKF | seqid_976 |
| variant_1302 | KKKKFLKIPKFLKLALKF | seqid_977 |
| variant_1303 | RKKKFLKIPKFLKLALKF | seqid_978 |
| variant_1304 | FKKKFLKIPKFLKLALKF | seqid_979 |
| variant_1305 | KWKKFLKIPKFLKLALKF | seqid_980 |
| variant_1306 | RWKKFLKIPKFLKLALKF | seqid_981 |
| variant_1307 | FWKKFLKIPKFLKLALKF | seqid_982 |
| variant_1308 | KKKLLLKIPKFLKLALKF | seqid_983 |
| variant_1309 | RKKLLLKIPKFLKLALKF | seqid_984 |
| variant_1310 | FKKLLLKIPKFLKLALKF | seqid_985 |
| variant_1311 | KWKLLLKIPKFLKLALKF | seqid_986 |
| variant_1312 | RWKLLLKIPKFLKLALKF | seqid_987 |
| variant_1313 | FWKLLLKIPKFLKLALKF | seqid_988 |
| variant_1314 | KKKKLLKIPKFLKLALKF | seqid_989 |
| variant_1315 | RKKKLLKIPKFLKLALKF | seqid_990 |
| variant_1316 | FKKKLLKIPKFLKLALKF | seqid_991 |
| variant_1317 | KWKKLLKIPKFLKLALKF | seqid_992 |
| variant_1318 | RWKKLLKIPKFLKLALKF | seqid_993 |
| variant_1319 | FWKKLLKIPKFLKLALKF | seqid_994 |
| variant_1320 | KKKLFKKIPKFLKLALKF | seqid_995 |
| variant_1321 | RKKLFKKIPKFLKLALKF | seqid_996 |
| variant_1322 | FKKLFKKIPKFLKLALKF | seqid_997 |
| variant_1323 | KWKLFKKIPKFLKLALKF | seqid_998 |
| variant_1324 | RWKLFKKIPKFLKLALKF | seqid_999 |
| variant_1325 | FWKLFKKIPKFLKLALKF | seqid_1000 |
| variant_1326 | KKKKFKKIPKFLKLALKF | seqid_1001 |
| variant_1327 | RKKKFKKIPKFLKLALKF | seqid_1002 |
| variant_1328 | FKKKFKKIPKFLKLALKF | seqid_1003 |
| variant_1329 | KWKKFKKIPKFLKLALKF | seqid_1004 |
| variant_1330 | RWKKFKKIPKFLKLALKF | seqid_1005 |
| variant_1331 | FWKKFKKIPKFLKLALKF | seqid_1006 |
| variant_1332 | KKKLLKKIPKFLKLALKF | seqid_1007 |
| variant_1333 | RKKLLKKIPKFLKLALKF | seqid_1008 |
| variant_1334 | FKKLLKKIPKFLKLALKF | seqid_1009 |
| variant_1335 | KWKLLKKIPKFLKLALKF | seqid_1010 |
| variant_1336 | RWKLLKKIPKFLKLALKF | seqid_1011 |
| variant_1337 | FWKLLKKIPKFLKLALKF | seqid_1012 |
| variant_1338 | KKKKLKKIPKFLKLALKF | seqid_1013 |
| variant_1339 | RKKKLKKIPKFLKLALKF | seqid_1014 |
| variant_1340 | FKKKLKKIPKFLKLALKF | seqid_1015 |
| variant_1341 | KWKKLKKIPKFLKLALKF | seqid_1016 |
| variant_1342 | RWKKLKKIPKFLKLALKF | seqid_1017 |
| variant_1343 | FWKKLKKIPKFLKLALKF | seqid_1018 |
| variant_1344 | KKKLFLKIPPPKFKKLALKF | seqid_1019 |
| variant_1345 | RKKLFLKIPPPKFKKLALKF | seqid_1020 |
| variant_1346 | FKKLFLKIPPPKFKKLALKF | seqid_1021 |
| variant_1347 | KWKLFLKIPPPKFKKLALKF | seqid_1022 |
| variant_1348 | RWKLFLKIPPPKFKKLALKF | seqid_1023 |
| variant_1349 | FWKLFLKIPPPKFKKLALKF | seqid_1024 |
| variant_1350 | KKKKFLKIPPPKFKKLALKF | seqid_1025 |
| variant_1351 | RKKKFLKIPPPKFKKLALKF | seqid_1026 |
| variant_1352 | FKKKFLKIPPPKFKKLALKF | seqid_1027 |
| variant_1353 | KWKKFLKIPPPKFKKLALKF | seqid_1028 |
| variant_1354 | RWKKFLKIPPPKFKKLALKF | seqid_1029 |
| variant_1355 | FWKKFLKIPPPKFKKLALKF | seqid_1030 |
| variant_1356 | KKKLLLKIPPPKFKKLALKF | seqid_1031 |
| variant_1357 | RKKLLLKIPPPKFKKLALKF | seqid_1032 |
| variant_1358 | FKKLLLKIPPPKFKKLALKF | seqid_1033 |
| variant_1359 | KWKLLLKIPPPKFKKLALKF | seqid_1034 |
| variant_1360 | RWKLLLKIPPPKFKKLALKF | seqid_1035 |
| variant_1361 | FWKLLLKIPPPKFKKLALKF | seqid_1036 |
| variant_1362 | KKKKLLKIPPPKFKKLALKF | seqid_1037 |
| variant_1363 | RKKKLLKIPPPKFKKLALKF | seqid_1038 |
| variant_1364 | FKKKLLKIPPPKFKKLALKF | seqid_1039 |
| variant_1365 | KWKKLLKIPPPKFKKLALKF | seqid_1040 |
| variant_1366 | RWKKLLKIPPPKFKKLALKF | seqid_1041 |
| variant_1367 | FWKKLLKIPPPKFKKLALKF | seqid_1042 |
| variant_1368 | KKKLFKKIPPPKFKKLALKF | seqid_1043 |
| variant_1369 | RKKLFKKIPPPKFKKLALKF | seqid_1044 |
| variant_1370 | FKKLFKKIPPPKFKKLALKF | seqid_1045 |
| variant_1371 | KWKLFKKIPPPKFKKLALKF | seqid_1046 |
| variant_1372 | RWKLFKKIPPPKFKKLALKF | seqid_1047 |
| variant_1373 | FWKLFKKIPPPKFKKLALKF | seqid_1048 |
| variant_1374 | KKKKFKKIPPPKFKKLALKF | seqid_1049 |
| variant_1375 | RKKKFKKIPPPKFKKLALKF | seqid_1050 |
| variant_1376 | FKKKFKKIPPPKFKKLALKF | seqid_1051 |
| variant_1377 | KWKKFKKIPPPKFKKLALKF | seqid_1052 |
| variant_1378 | RWKKFKKIPPPKFKKLALKF | seqid_1053 |
| variant_1379 | FWKKFKKIPPPKFKKLALKF | seqid_1054 |
| variant_1380 | KKKLLKKIPPPKFKKLALKF | seqid_1055 |
| variant_1381 | RKKLLKKIPPPKFKKLALKF | seqid_1056 |
| variant_1382 | FKKLLKKIPPPKFKKLALKF | seqid_1057 |
| variant_1383 | KWKLLKKIPPPKFKKLALKF | seqid_1058 |
| variant_1384 | RWKLLKKIPPPKFKKLALKF | seqid_1059 |
| variant_1385 | FWKLLKKIPPPKFKKLALKF | seqid_1060 |
| variant_1386 | KKKKLKKIPPPKFKKLALKF | seqid_1061 |
| variant_1387 | RKKKLKKIPPPKFKKLALKF | seqid_1062 |
| variant_1388 | FKKKLKKIPPPKFKKLALKF | seqid_1063 |
| variant_1389 | KWKKLKKIPPPKFKKLALKF | seqid_1064 |
| variant_1390 | RWKKLKKIPPPKFKKLALKF | seqid_1065 |
| variant_1391 | FWKKLKKIPPPKFKKLALKF | seqid_1066 |
| variant_1392 | KKKLFLKIPPKFKKLALKF | seqid_1067 |
| variant_1393 | RKKLFLKIPPKFKKLALKF | seqid_1068 |
| variant_1394 | FKKLFLKIPPKFKKLALKF | seqid_1069 |
| variant_1395 | KWKLFLKIPPKFKKLALKF | seqid_1070 |
| variant_1396 | RWKLFLKIPPKFKKLALKF | seqid_1071 |
| variant_1397 | FWKLFLKIPPKFKKLALKF | seqid_1072 |
| variant_1398 | KKKKFLKIPPKFKKLALKF | seqid_1073 |
| variant_1399 | RKKKFLKIPPKFKKLALKF | seqid_1074 |
| variant_1400 | FKKKFLKIPPKFKKLALKF | seqid_1075 |
| variant_1401 | KWKKFLKIPPKFKKLALKF | seqid_1076 |
| variant_1402 | RWKKFLKIPPKFKKLALKF | seqid_1077 |
| variant_1403 | FWKKFLKIPPKFKKLALKF | seqid_1078 |
| variant_1404 | KKKLLLKIPPKFKKLALKF | seqid_1079 |
| variant_1405 | RKKLLLKIPPKFKKLALKF | seqid_1080 |
| variant_1406 | FKKLLLKIPPKFKKLALKF | seqid_1081 |
| variant_1407 | KWKLLLKIPPKFKKLALKF | seqid_1082 |
| variant_1408 | RWKLLLKIPPKFKKLALKF | seqid_1083 |
| variant_1409 | FWKLLLKIPPKFKKLALKF | seqid_1084 |
| variant_1410 | KKKKLLKIPPKFKKLALKF | seqid_1085 |
| variant_1411 | RKKKLLKIPPKFKKLALKF | seqid_1086 |
| variant_1412 | FKKKLLKIPPKFKKLALKF | seqid_1087 |
| variant_1413 | KWKKLLKIPPKFKKLALKF | seqid_1088 |
| variant_1414 | RWKKLLKIPPKFKKLALKF | seqid_1089 |
| variant_1415 | FWKKLLKIPPKFKKLALKF | seqid_1090 |
| variant_1416 | KKKLFKKIPPKFKKLALKF | seqid_1091 |
| variant_1417 | RKKLFKKIPPKFKKLALKF | seqid_1092 |
| variant_1418 | FKKLFKKIPPKFKKLALKF | seqid_1093 |
| variant_1419 | KWKLFKKIPPKFKKLALKF | seqid_1094 |
| variant_1420 | RWKLFKKIPPKFKKLALKF | seqid_1095 |
| variant_1421 | FWKLFKKIPPKFKKLALKF | seqid_1096 |
| variant_1422 | KKKKFKKIPPKFKKLALKF | seqid_1097 |
| variant_1423 | RKKKFKKIPPKFKKLALKF | seqid_1098 |
| variant_1424 | FKKKFKKIPPKFKKLALKF | seqid_1099 |
| variant_1425 | KWKKFKKIPPKFKKLALKF | seqid_1100 |
| variant_1426 | RWKKFKKIPPKFKKLALKF | seqid_1101 |
| variant_1427 | FWKKFKKIPPKFKKLALKF | seqid_1102 |
| variant_1428 | KKKLLKKIPPKFKKLALKF | seqid_1103 |
| variant_1429 | RKKLLKKIPPKFKKLALKF | seqid_1104 |
| variant_1430 | FKKLLKKIPPKFKKLALKF | seqid_1105 |
| variant_1431 | KWKLLKKIPPKFKKLALKF | seqid_1106 |
| variant_1432 | RWKLLKKIPPKFKKLALKF | seqid_1107 |
| variant_1433 | FWKLLKKIPPKFKKLALKF | seqid_1108 |
| variant_1434 | KKKKLKKIPPKFKKLALKF | seqid_1109 |
| variant_1435 | RKKKLKKIPPKFKKLALKF | seqid_1110 |
| variant_1436 | FKKKLKKIPPKFKKLALKF | seqid_1111 |
| variant_1437 | KWKKLKKIPPKFKKLALKF | seqid_1112 |
| variant_1438 | RWKKLKKIPPKFKKLALKF | seqid_1113 |
| variant_1439 | FWKKLKKIPPKFKKLALKF | seqid_1114 |
| variant_1488 | KKKLFLKIPKFKKLALKF | seqid_1115 |
| variant_1489 | RKKLFLKIPKFKKLALKF | seqid_1116 |
| variant_1490 | FKKLFLKIPKFKKLALKF | seqid_1117 |
| variant_1491 | KWKLFLKIPKFKKLALKF | seqid_1118 |
| variant_1492 | RWKLFLKIPKFKKLALKF | seqid_1119 |
| variant_1493 | FWKLFLKIPKFKKLALKF | seqid_1120 |
| variant_1494 | KKKKFLKIPKFKKLALKF | seqid_1121 |
| variant_1495 | RKKKFLKIPKFKKLALKF | seqid_1122 |
| variant_1496 | FKKKFLKIPKFKKLALKF | seqid_1123 |
| variant_1497 | KWKKFLKIPKFKKLALKF | seqid_1124 |
| variant_1498 | RWKKFLKIPKFKKLALKF | seqid_1125 |
| variant_1499 | FWKKFLKIPKFKKLALKF | seqid_1126 |
| variant_1500 | KKKLLLKIPKFKKLALKF | seqid_1127 |
| variant_1501 | RKKLLLKIPKFKKLALKF | seqid_1128 |
| variant_1502 | FKKLLLKIPKFKKLALKF | seqid_1129 |
| variant_1503 | KWKLLLKIPKFKKLALKF | seqid_1130 |
| variant_1504 | RWKLLLKIPKFKKLALKF | seqid_1131 |
| variant_1505 | FWKLLLKIPKFKKLALKF | seqid_1132 |
| variant_1506 | KKKKLLKIPKFKKLALKF | seqid_1133 |
| variant_1507 | RKKKLLKIPKFKKLALKF | seqid_1134 |
| variant_1508 | FKKKLLKIPKFKKLALKF | seqid_1135 |
| variant_1509 | KWKKLLKIPKFKKLALKF | seqid_1136 |
| variant_1510 | RWKKLLKIPKFKKLALKF | seqid_1137 |
| variant_1511 | FWKKLLKIPKFKKLALKF | seqid_1138 |
| variant_1512 | KKKLFKKIPKFKKLALKF | seqid_1139 |
| variant_1513 | RKKLFKKIPKFKKLALKF | seqid_1140 |
| variant_1514 | FKKLFKKIPKFKKLALKF | seqid_1141 |
| variant_1515 | KWKLFKKIPKFKKLALKF | seqid_1142 |
| variant_1516 | RWKLFKKIPKFKKLALKF | seqid_1143 |
| variant_1517 | FWKLFKKIPKFKKLALKF | seqid_1144 |
| variant_1518 | KKKKFKKIPKFKKLALKF | seqid_1145 |
| variant_1519 | RKKKFKKIPKFKKLALKF | seqid_1146 |
| variant_1520 | FKKKFKKIPKFKKLALKF | seqid_1147 |
| variant_1521 | KWKKFKKIPKFKKLALKF | seqid_1148 |
| variant_1522 | RWKKFKKIPKFKKLALKF | seqid_1149 |
| variant_1523 | FWKKFKKIPKFKKLALKF | seqid_1150 |
| variant_1524 | KKKLLKKIPKFKKLALKF | seqid_1151 |
| variant_1525 | RKKLLKKIPKFKKLALKF | seqid_1152 |
| variant_1526 | FKKLLKKIPKFKKLALKF | seqid_1153 |
| variant_1527 | KWKLLKKIPKFKKLALKF | seqid_6 |
| variant_1528 | RWKLLKKIPKFKKLALKF | seqid_1154 |
| variant_1529 | FWKLLKKIPKFKKLALKF | seqid_1155 |
| variant_1530 | KKKKLKKIPKFKKLALKF | seqid_1156 |
| variant_1531 | RKKKLKKIPKFKKLALKF | seqid_1157 |
| variant_1532 | FKKKLKKIPKFKKLALKF | seqid_1158 |
| variant_1533 | KWKKLKKIPKFKKLALKF | seqid_1159 |
| variant_1534 | RWKKLKKIPKFKKLALKF | seqid_1160 |
| variant_1535 | FWKKLKKIPKFKKLALKF | seqid_1161 |
| variant_1536 | KKKLFLKIPPPKFLHVALKF | seqid_1162 |
| variant_1537 | RKKLFLKIPPPKFLHVALKF | seqid_1163 |
| variant_1538 | FKKLFLKIPPPKFLHVALKF | seqid_1164 |
| variant_1539 | KWKLFLKIPPPKFLHVALKF | seqid_1165 |
| variant_1540 | RWKLFLKIPPPKFLHVALKF | seqid_1166 |
| variant_1541 | FWKLFLKIPPPKFLHVALKF | seqid_1167 |
| variant_1542 | KKKKFLKIPPPKFLHVALKF | seqid_1168 |
| variant_1543 | RKKKFLKIPPPKFLHVALKF | seqid_1169 |
| variant_1544 | FKKKFLKIPPPKFLHVALKF | seqid_1170 |
| variant_1545 | KWKKFLKIPPPKFLHVALKF | seqid_1171 |
| variant_1546 | RWKKFLKIPPPKFLHVALKF | seqid_1172 |
| variant_1547 | FWKKFLKIPPPKFLHVALKF | seqid_1173 |
| variant_1548 | KKKLLLKIPPPKFLHVALKF | seqid_1174 |
| variant_1549 | RKKLLLKIPPPKFLHVALKF | seqid_1175 |
| variant_1550 | FKKLLLKIPPPKFLHVALKF | seqid_1176 |
| variant_1551 | KWKLLLKIPPPKFLHVALKF | seqid_1177 |
| variant_1552 | RWKLLLKIPPPKFLHVALKF | seqid_1178 |
| variant_1553 | FWKLLLKIPPPKFLHVALKF | seqid_1179 |
| variant_1554 | KKKKLLKIPPPKFLHVALKF | seqid_1180 |
| variant_1555 | RKKKLLKIPPPKFLHVALKF | seqid_1181 |
| variant_1556 | FKKKLLKIPPPKFLHVALKF | seqid_1182 |
| variant_1557 | KWKKLLKIPPPKFLHVALKF | seqid_1183 |
| variant_1558 | RWKKLLKIPPPKFLHVALKF | seqid_1184 |
| variant_1559 | FWKKLLKIPPPKFLHVALKF | seqid_1185 |
| variant_1560 | KKKLFKKIPPPKFLHVALKF | seqid_1186 |
| variant_1561 | RKKLFKKIPPPKFLHVALKF | seqid_1187 |
| variant_1562 | FKKLFKKIPPPKFLHVALKF | seqid_1188 |
| variant_1563 | KWKLFKKIPPPKFLHVALKF | seqid_1189 |
| variant_1564 | RWKLFKKIPPPKFLHVALKF | seqid_1190 |
| variant_1565 | FWKLFKKIPPPKFLHVALKF | seqid_1191 |
| variant_1566 | KKKKFKKIPPPKFLHVALKF | seqid_1192 |
| variant_1567 | RKKKFKKIPPPKFLHVALKF | seqid_1193 |
| variant_1568 | FKKKFKKIPPPKFLHVALKF | seqid_1194 |
| variant_1569 | KWKKFKKIPPPKFLHVALKF | seqid_1195 |
| variant_1570 | RWKKFKKIPPPKFLHVALKF | seqid_1196 |
| variant_1571 | FWKKFKKIPPPKFLHVALKF | seqid_1197 |
| variant_1572 | KKKLLKKIPPPKFLHVALKF | seqid_1198 |
| variant_1573 | RKKLLKKIPPPKFLHVALKF | seqid_1199 |
| variant_1574 | FKKLLKKIPPPKFLHVALKF | seqid_1200 |
| variant_1575 | KWKLLKKIPPPKFLHVALKF | seqid_1201 |
| variant_1576 | RWKLLKKIPPPKFLHVALKF | seqid_1202 |
| variant_1577 | FWKLLKKIPPPKFLHVALKF | seqid_1203 |
| variant_1578 | KKKKLKKIPPPKFLHVALKF | seqid_1204 |
| variant_1579 | RKKKLKKIPPPKFLHVALKF | seqid_1205 |
| variant_1580 | FKKKLKKIPPPKFLHVALKF | seqid_1206 |
| variant_1581 | KWKKLKKIPPPKFLHVALKF | seqid_1207 |
| variant_1582 | RWKKLKKIPPPKFLHVALKF | seqid_1208 |
| variant_1583 | FWKKLKKIPPPKFLHVALKF | seqid_1209 |
| variant_1584 | KKKLFLKIPPKFLHVALKF | seqid_1210 |
| variant_1585 | RKKLFLKIPPKFLHVALKF | seqid_1211 |
| variant_1586 | FKKLFLKIPPKFLHVALKF | seqid_1212 |
| variant_1587 | KWKLFLKIPPKFLHVALKF | seqid_1213 |
| variant_1588 | RWKLFLKIPPKFLHVALKF | seqid_1214 |
| variant_1589 | FWKLFLKIPPKFLHVALKF | seqid_1215 |
| variant_1590 | KKKKFLKIPPKFLHVALKF | seqid_1216 |
| variant_1591 | RKKKFLKIPPKFLHVALKF | seqid_1217 |
| variant_1592 | FKKKFLKIPPKFLHVALKF | seqid_1218 |
| variant_1593 | KWKKFLKIPPKFLHVALKF | seqid_1219 |
| variant_1594 | RWKKFLKIPPKFLHVALKF | seqid_1220 |
| variant_1595 | FWKKFLKIPPKFLHVALKF | seqid_1221 |
| variant_1596 | KKKLLLKIPPKFLHVALKF | seqid_1222 |
| variant_1597 | RKKLLLKIPPKFLHVALKF | seqid_1223 |
| variant_1598 | FKKLLLKIPPKFLHVALKF | seqid_1224 |
| variant_1599 | KWKLLLKIPPKFLHVALKF | seqid_1225 |
| variant_1600 | RWKLLLKIPPKFLHVALKF | seqid_1226 |
| variant_1601 | FWKLLLKIPPKFLHVALKF | seqid_1227 |
| variant_1602 | KKKKLLKIPPKFLHVALKF | seqid_1228 |
| variant_1603 | RKKKLLKIPPKFLHVALKF | seqid_1229 |
| variant_1604 | FKKKLLKIPPKFLHVALKF | seqid_1230 |
| variant_1605 | KWKKLLKIPPKFLHVALKF | seqid_1231 |
| variant_1606 | RWKKLLKIPPKFLHVALKF | seqid_1232 |
| variant_1607 | FWKKLLKIPPKFLHVALKF | seqid_1233 |
| variant_1608 | KKKLFKKIPPKFLHVALKF | seqid_1234 |
| variant_1609 | RKKLFKKIPPKFLHVALKF | seqid_1235 |
| variant_1610 | FKKLFKKIPPKFLHVALKF | seqid_1236 |
| variant_1611 | KWKLFKKIPPKFLHVALKF | seqid_1237 |
| variant_1612 | RWKLFKKIPPKFLHVALKF | seqid_1238 |
| variant_1613 | FWKLFKKIPPKFLHVALKF | seqid_1239 |
| variant_1614 | KKKKFKKIPPKFLHVALKF | seqid_1240 |
| variant_1615 | RKKKFKKIPPKFLHVALKF | seqid_1241 |
| variant_1616 | FKKKFKKIPPKFLHVALKF | seqid_1242 |
| variant_1617 | KWKKFKKIPPKFLHVALKF | seqid_1243 |
| variant_1618 | RWKKFKKIPPKFLHVALKF | seqid_1244 |
| variant_1619 | FWKKFKKIPPKFLHVALKF | seqid_1245 |
| variant_1620 | KKKLLKKIPPKFLHVALKF | seqid_1246 |
| variant_1621 | RKKLLKKIPPKFLHVALKF | seqid_1247 |
| variant_1622 | FKKLLKKIPPKFLHVALKF | seqid_1248 |
| variant_1623 | KWKLLKKIPPKFLHVALKF | seqid_1249 |
| variant_1624 | RWKLLKKIPPKFLHVALKF | seqid_1250 |
| variant_1625 | FWKLLKKIPPKFLHVALKF | seqid_1251 |
| variant_1626 | KKKKLKKIPPKFLHVALKF | seqid_1252 |
| variant_1627 | RKKKLKKIPPKFLHVALKF | seqid_1253 |
| variant_1628 | FKKKLKKIPPKFLHVALKF | seqid_1254 |
| variant_1629 | KWKKLKKIPPKFLHVALKF | seqid_1255 |
| variant_1630 | RWKKLKKIPPKFLHVALKF | seqid_1256 |
| variant_1631 | FWKKLKKIPPKFLHVALKF | seqid_1257 |
| variant_1680 | KKKLFLKIPKFLHVALKF | seqid_1258 |
| variant_1681 | RKKLFLKIPKFLHVALKF | seqid_1259 |
| variant_1682 | FKKLFLKIPKFLHVALKF | seqid_1260 |
| variant_1683 | KWKLFLKIPKFLHVALKF | seqid_1261 |
| variant_1684 | RWKLFLKIPKFLHVALKF | seqid_1262 |
| variant_1685 | FWKLFLKIPKFLHVALKF | seqid_1263 |
| variant_1686 | KKKKFLKIPKFLHVALKF | seqid_1264 |
| variant_1687 | RKKKFLKIPKFLHVALKF | seqid_1265 |
| variant_1688 | FKKKFLKIPKFLHVALKF | seqid_1266 |
| variant_1689 | KWKKFLKIPKFLHVALKF | seqid_1267 |
| variant_1690 | RWKKFLKIPKFLHVALKF | seqid_1268 |
| variant_1691 | FWKKFLKIPKFLHVALKF | seqid_1269 |
| variant_1692 | KKKLLLKIPKFLHVALKF | seqid_1270 |
| variant_1693 | RKKLLLKIPKFLHVALKF | seqid_1271 |
| variant_1694 | FKKLLLKIPKFLHVALKF | seqid_1272 |
| variant_1695 | KWKLLLKIPKFLHVALKF | seqid_1273 |
| variant_1696 | RWKLLLKIPKFLHVALKF | seqid_1274 |
| variant_1697 | FWKLLLKIPKFLHVALKF | seqid_1275 |
| variant_1698 | KKKKLLKIPKFLHVALKF | seqid_1276 |
| variant_1699 | RKKKLLKIPKFLHVALKF | seqid_1277 |
| variant_1700 | FKKKLLKIPKFLHVALKF | seqid_1278 |
| variant_1701 | KWKKLLKIPKFLHVALKF | seqid_1279 |
| variant_1702 | RWKKLLKIPKFLHVALKF | seqid_1280 |
| variant_1703 | FWKKLLKIPKFLHVALKF | seqid_1281 |
| variant_1704 | KKKLFKKIPKFLHVALKF | seqid_1282 |
| variant_1705 | RKKLFKKIPKFLHVALKF | seqid_1283 |
| variant_1706 | FKKLFKKIPKFLHVALKF | seqid_1284 |
| variant_1707 | KWKLFKKIPKFLHVALKF | seqid_1285 |
| variant_1708 | RWKLFKKIPKFLHVALKF | seqid_1286 |
| variant_1709 | FWKLFKKIPKFLHVALKF | seqid_1287 |
| variant_1710 | KKKKFKKIPKFLHVALKF | seqid_1288 |
| variant_1711 | RKKKFKKIPKFLHVALKF | seqid_1289 |
| variant_1712 | FKKKFKKIPKFLHVALKF | seqid_1290 |
| variant_1713 | KWKKFKKIPKFLHVALKF | seqid_1291 |
| variant_1714 | RWKKFKKIPKFLHVALKF | seqid_1292 |
| variant_1715 | FWKKFKKIPKFLHVALKF | seqid_1293 |
| variant_1716 | KKKLLKKIPKFLHVALKF | seqid_1294 |
| variant_1717 | RKKLLKKIPKFLHVALKF | seqid_1295 |
| variant_1718 | FKKLLKKIPKFLHVALKF | seqid_1296 |
| variant_1719 | KWKLLKKIPKFLHVALKF | seqid_1297 |
| variant_1720 | RWKLLKKIPKFLHVALKF | seqid_1298 |
| variant_1721 | FWKLLKKIPKFLHVALKF | seqid_1299 |
| variant_1722 | KKKKLKKIPKFLHVALKF | seqid_1300 |
| variant_1723 | RKKKLKKIPKFLHVALKF | seqid_1301 |
| variant_1724 | FKKKLKKIPKFLHVALKF | seqid_1302 |
| variant_1725 | KWKKLKKIPKFLHVALKF | seqid_1303 |
| variant_1726 | RWKKLKKIPKFLHVALKF | seqid_1304 |
| variant_1727 | FWKKLKKIPKFLHVALKF | seqid_1305 |
| variant_1728 | KKKLFLKIPPPKFKHVALKF | seqid_1306 |
| variant_1729 | RKKLFLKIPPPKFKHVALKF | seqid_1307 |
| variant_1730 | FKKLFLKIPPPKFKHVALKF | seqid_1308 |
| variant_1731 | KWKLFLKIPPPKFKHVALKF | seqid_1309 |
| variant_1732 | RWKLFLKIPPPKFKHVALKF | seqid_1310 |
| variant_1733 | FWKLFLKIPPPKFKHVALKF | seqid_1311 |
| variant_1734 | KKKKFLKIPPPKFKHVALKF | seqid_1312 |
| variant_1735 | RKKKFLKIPPPKFKHVALKF | seqid_1313 |
| variant_1736 | FKKKFLKIPPPKFKHVALKF | seqid_1314 |
| variant_1737 | KWKKFLKIPPPKFKHVALKF | seqid_1315 |
| variant_1738 | RWKKFLKIPPPKFKHVALKF | seqid_1316 |
| variant_1739 | FWKKFLKIPPPKFKHVALKF | seqid_1317 |
| variant_1740 | KKKLLLKIPPPKFKHVALKF | seqid_1318 |
| variant_1741 | RKKLLLKIPPPKFKHVALKF | seqid_1319 |
| variant_1742 | FKKLLLKIPPPKFKHVALKF | seqid_1320 |
| variant_1743 | KWKLLLKIPPPKFKHVALKF | seqid_1321 |
| variant_1744 | RWKLLLKIPPPKFKHVALKF | seqid_1322 |
| variant_1745 | FWKLLLKIPPPKFKHVALKF | seqid_1323 |
| variant_1746 | KKKKLLKIPPPKFKHVALKF | seqid_1324 |
| variant_1747 | RKKKLLKIPPPKFKHVALKF | seqid_1325 |
| variant_1748 | FKKKLLKIPPPKFKHVALKF | seqid_1326 |
| variant_1749 | KWKKLLKIPPPKFKHVALKF | seqid_1327 |
| variant_1750 | RWKKLLKIPPPKFKHVALKF | seqid_1328 |
| variant_1751 | FWKKLLKIPPPKFKHVALKF | seqid_1329 |
| variant_1752 | KKKLFKKIPPPKFKHVALKF | seqid_1330 |
| variant_1753 | RKKLFKKIPPPKFKHVALKF | seqid_1331 |
| variant_1754 | FKKLFKKIPPPKFKHVALKF | seqid_1332 |
| variant_1755 | KWKLFKKIPPPKFKHVALKF | seqid_1333 |
| variant_1756 | RWKLFKKIPPPKFKHVALKF | seqid_1334 |
| variant_1757 | FWKLFKKIPPPKFKHVALKF | seqid_1335 |
| variant_1758 | KKKKFKKIPPPKFKHVALKF | seqid_1336 |
| variant_1759 | RKKKFKKIPPPKFKHVALKF | seqid_1337 |
| variant_1760 | FKKKFKKIPPPKFKHVALKF | seqid_1338 |
| variant_1761 | KWKKFKKIPPPKFKHVALKF | seqid_1339 |
| variant_1762 | RWKKFKKIPPPKFKHVALKF | seqid_1340 |
| variant_1763 | FWKKFKKIPPPKFKHVALKF | seqid_1341 |
| variant_1764 | KKKLLKKIPPPKFKHVALKF | seqid_1342 |
| variant_1765 | RKKLLKKIPPPKFKHVALKF | seqid_1343 |
| variant_1766 | FKKLLKKIPPPKFKHVALKF | seqid_1344 |
| variant_1767 | KWKLLKKIPPPKFKHVALKF | seqid_1345 |
| variant_1768 | RWKLLKKIPPPKFKHVALKF | seqid_1346 |
| variant_1769 | FWKLLKKIPPPKFKHVALKF | seqid_1347 |
| variant_1770 | KKKKLKKIPPPKFKHVALKF | seqid_1348 |
| variant_1771 | RKKKLKKIPPPKFKHVALKF | seqid_1349 |
| variant_1772 | FKKKLKKIPPPKFKHVALKF | seqid_1350 |
| variant_1773 | KWKKLKKIPPPKFKHVALKF | seqid_1351 |
| variant_1774 | RWKKLKKIPPPKFKHVALKF | seqid_1352 |
| variant_1775 | FWKKLKKIPPPKFKHVALKF | seqid_1353 |
| variant_1776 | KKKLFLKIPPKFKHVALKF | seqid_1354 |
| variant_1777 | RKKLFLKIPPKFKHVALKF | seqid_1355 |
| variant_1778 | FKKLFLKIPPKFKHVALKF | seqid_1356 |
| variant_1779 | KWKLFLKIPPKFKHVALKF | seqid_1357 |
| variant_1780 | RWKLFLKIPPKFKHVALKF | seqid_1358 |
| variant_1781 | FWKLFLKIPPKFKHVALKF | seqid_1359 |
| variant_1782 | KKKKFLKIPPKFKHVALKF | seqid_1360 |
| variant_1783 | RKKKFLKIPPKFKHVALKF | seqid_1361 |
| variant_1784 | FKKKFLKIPPKFKHVALKF | seqid_1362 |
| variant_1785 | KWKKFLKIPPKFKHVALKF | seqid_1363 |
| variant_1786 | RWKKFLKIPPKFKHVALKF | seqid_1364 |
| variant_1787 | FWKKFLKIPPKFKHVALKF | seqid_1365 |
| variant_1788 | KKKLLLKIPPKFKHVALKF | seqid_1366 |
| variant_1789 | RKKLLLKIPPKFKHVALKF | seqid_1367 |
| variant_1790 | FKKLLLKIPPKFKHVALKF | seqid_1368 |
| variant_1791 | KWKLLLKIPPKFKHVALKF | seqid_1369 |
| variant_1792 | RWKLLLKIPPKFKHVALKF | seqid_1370 |
| variant_1793 | FWKLLLKIPPKFKHVALKF | seqid_1371 |
| variant_1794 | KKKKLLKIPPKFKHVALKF | seqid_1372 |
| variant_1795 | RKKKLLKIPPKFKHVALKF | seqid_1373 |
| variant_1796 | FKKKLLKIPPKFKHVALKF | seqid_1374 |
| variant_1797 | KWKKLLKIPPKFKHVALKF | seqid_1375 |
| variant_1798 | RWKKLLKIPPKFKHVALKF | seqid_1376 |
| variant_1799 | FWKKLLKIPPKFKHVALKF | seqid_1377 |
| variant_1800 | KKKLFKKIPPKFKHVALKF | seqid_1378 |
| variant_1801 | RKKLFKKIPPKFKHVALKF | seqid_1379 |
| variant_1802 | FKKLFKKIPPKFKHVALKF | seqid_1380 |
| variant_1803 | KWKLFKKIPPKFKHVALKF | seqid_1381 |
| variant_1804 | RWKLFKKIPPKFKHVALKF | seqid_1382 |
| variant_1805 | FWKLFKKIPPKFKHVALKF | seqid_1383 |
| variant_1806 | KKKKFKKIPPKFKHVALKF | seqid_1384 |
| variant_1807 | RKKKFKKIPPKFKHVALKF | seqid_1385 |
| variant_1808 | FKKKFKKIPPKFKHVALKF | seqid_1386 |
| variant_1809 | KWKKFKKIPPKFKHVALKF | seqid_1387 |
| variant_1810 | RWKKFKKIPPKFKHVALKF | seqid_1388 |
| variant_1811 | FWKKFKKIPPKFKHVALKF | seqid_1389 |
| variant_1812 | KKKLLKKIPPKFKHVALKF | seqid_1390 |
| variant_1813 | RKKLLKKIPPKFKHVALKF | seqid_1391 |
| variant_1814 | FKKLLKKIPPKFKHVALKF | seqid_1392 |
| variant_1815 | KWKLLKKIPPKFKHVALKF | seqid_1393 |
| variant_1816 | RWKLLKKIPPKFKHVALKF | seqid_1394 |
| variant_1817 | FWKLLKKIPPKFKHVALKF | seqid_1395 |
| variant_1818 | KKKKLKKIPPKFKHVALKF | seqid_1396 |
| variant_1819 | RKKKLKKIPPKFKHVALKF | seqid_1397 |
| variant_1820 | FKKKLKKIPPKFKHVALKF | seqid_1398 |
| variant_1821 | KWKKLKKIPPKFKHVALKF | seqid_1399 |
| variant_1822 | RWKKLKKIPPKFKHVALKF | seqid_1400 |
| variant_1823 | FWKKLKKIPPKFKHVALKF | seqid_1401 |
| variant_1872 | KKKLFLKIPKFKHVALKF | seqid_1402 |
| variant_1873 | RKKLFLKIPKFKHVALKF | seqid_1403 |
| variant_1874 | FKKLFLKIPKFKHVALKF | seqid_1404 |
| variant_1875 | KWKLFLKIPKFKHVALKF | seqid_1405 |
| variant_1876 | RWKLFLKIPKFKHVALKF | seqid_1406 |
| variant_1877 | FWKLFLKIPKFKHVALKF | seqid_1407 |
| variant_1878 | KKKKFLKIPKFKHVALKF | seqid_1408 |
| variant_1879 | RKKKFLKIPKFKHVALKF | seqid_1409 |
| variant_1880 | FKKKFLKIPKFKHVALKF | seqid_1410 |
| variant_1881 | KWKKFLKIPKFKHVALKF | seqid_1411 |
| variant_1882 | RWKKFLKIPKFKHVALKF | seqid_1412 |
| variant_1883 | FWKKFLKIPKFKHVALKF | seqid_1413 |
| variant_1884 | KKKLLLKIPKFKHVALKF | seqid_1414 |
| variant_1885 | RKKLLLKIPKFKHVALKF | seqid_1415 |
| variant_1886 | FKKLLLKIPKFKHVALKF | seqid_1416 |
| variant_1887 | KWKLLLKIPKFKHVALKF | seqid_1417 |
| variant_1888 | RWKLLLKIPKFKHVALKF | seqid_1418 |
| variant_1889 | FWKLLLKIPKFKHVALKF | seqid_1419 |
| variant_1890 | KKKKLLKIPKFKHVALKF | seqid_1420 |
| variant_1891 | RKKKLLKIPKFKHVALKF | seqid_1421 |
| variant_1892 | FKKKLLKIPKFKHVALKF | seqid_1422 |
| variant_1893 | KWKKLLKIPKFKHVALKF | seqid_1423 |
| variant_1894 | RWKKLLKIPKFKHVALKF | seqid_1424 |
| variant_1895 | FWKKLLKIPKFKHVALKF | seqid_1425 |
| variant_1896 | KKKLFKKIPKFKHVALKF | seqid_1426 |
| variant_1897 | RKKLFKKIPKFKHVALKF | seqid_1427 |
| variant_1898 | FKKLFKKIPKFKHVALKF | seqid_1428 |
| variant_1899 | KWKLFKKIPKFKHVALKF | seqid_1429 |
| variant_1900 | RWKLFKKIPKFKHVALKF | seqid_1430 |
| variant_1901 | FWKLFKKIPKFKHVALKF | seqid_1431 |
| variant_1902 | KKKKFKKIPKFKHVALKF | seqid_1432 |
| variant_1903 | RKKKFKKIPKFKHVALKF | seqid_1433 |
| variant_1904 | FKKKFKKIPKFKHVALKF | seqid_1434 |
| variant_1905 | KWKKFKKIPKFKHVALKF | seqid_1435 |
| variant_1906 | RWKKFKKIPKFKHVALKF | seqid_1436 |
| variant_1907 | FWKKFKKIPKFKHVALKF | seqid_1437 |
| variant_1908 | KKKLLKKIPKFKHVALKF | seqid_1438 |
| variant_1909 | RKKLLKKIPKFKHVALKF | seqid_1439 |
| variant_1910 | FKKLLKKIPKFKHVALKF | seqid_1440 |
| variant_1911 | KWKLLKKIPKFKHVALKF | seqid_1441 |
| variant_1912 | RWKLLKKIPKFKHVALKF | seqid_1442 |
| variant_1913 | FWKLLKKIPKFKHVALKF | seqid_1443 |
| variant_1914 | KKKKLKKIPKFKHVALKF | seqid_1444 |
| variant_1915 | RKKKLKKIPKFKHVALKF | seqid_1445 |
| variant_1916 | FKKKLKKIPKFKHVALKF | seqid_1446 |
| variant_1917 | KWKKLKKIPKFKHVALKF | seqid_1447 |
| variant_1918 | RWKKLKKIPKFKHVALKF | seqid_1448 |
| variant_1919 | FWKKLKKIPKFKHVALKF | seqid_1449 |
| variant_1920 | KKKLFLKIPPPKFLKVALKF | seqid_1450 |
| variant_1921 | RKKLFLKIPPPKFLKVALKF | seqid_1451 |
| variant_1922 | FKKLFLKIPPPKFLKVALKF | seqid_1452 |
| variant_1923 | KWKLFLKIPPPKFLKVALKF | seqid_1453 |
| variant_1924 | RWKLFLKIPPPKFLKVALKF | seqid_1454 |
| variant_1925 | FWKLFLKIPPPKFLKVALKF | seqid_1455 |
| variant_1926 | KKKKFLKIPPPKFLKVALKF | seqid_1456 |
| variant_1927 | RKKKFLKIPPPKFLKVALKF | seqid_1457 |
| variant_1928 | FKKKFLKIPPPKFLKVALKF | seqid_1458 |
| variant_1929 | KWKKFLKIPPPKFLKVALKF | seqid_1459 |
| variant_1930 | RWKKFLKIPPPKFLKVALKF | seqid_1460 |
| variant_1931 | FWKKFLKIPPPKFLKVALKF | seqid_1461 |
| variant_1932 | KKKLLLKIPPPKFLKVALKF | seqid_1462 |
| variant_1933 | RKKLLLKIPPPKFLKVALKF | seqid_1463 |
| variant_1934 | FKKLLLKIPPPKFLKVALKF | seqid_1464 |
| variant_1935 | KWKLLLKIPPPKFLKVALKF | seqid_1465 |
| variant_1936 | RWKLLLKIPPPKFLKVALKF | seqid_1466 |
| variant_1937 | FWKLLLKIPPPKFLKVALKF | seqid_1467 |
| variant_1938 | KKKKLLKIPPPKFLKVALKF | seqid_1468 |
| variant_1939 | RKKKLLKIPPPKFLKVALKF | seqid_1469 |
| variant_1940 | FKKKLLKIPPPKFLKVALKF | seqid_1470 |
| variant_1941 | KWKKLLKIPPPKFLKVALKF | seqid_1471 |
| variant_1942 | RWKKLLKIPPPKFLKVALKF | seqid_1472 |
| variant_1943 | FWKKLLKIPPPKFLKVALKF | seqid_1473 |
| variant_1944 | KKKLFKKIPPPKFLKVALKF | seqid_1474 |
| variant_1945 | RKKLFKKIPPPKFLKVALKF | seqid_1475 |
| variant_1946 | FKKLFKKIPPPKFLKVALKF | seqid_1476 |
| variant_1947 | KWKLFKKIPPPKFLKVALKF | seqid_1477 |
| variant_1948 | RWKLFKKIPPPKFLKVALKF | seqid_1478 |
| variant_1949 | FWKLFKKIPPPKFLKVALKF | seqid_1479 |
| variant_1950 | KKKKFKKIPPPKFLKVALKF | seqid_1480 |
| variant_1951 | RKKKFKKIPPPKFLKVALKF | seqid_1481 |
| variant_1952 | FKKKFKKIPPPKFLKVALKF | seqid_1482 |
| variant_1953 | KWKKFKKIPPPKFLKVALKF | seqid_1483 |
| variant_1954 | RWKKFKKIPPPKFLKVALKF | seqid_1484 |
| variant_1955 | FWKKFKKIPPPKFLKVALKF | seqid_1485 |
| variant_1956 | KKKLLKKIPPPKFLKVALKF | seqid_1486 |
| variant_1957 | RKKLLKKIPPPKFLKVALKF | seqid_1487 |
| variant_1958 | FKKLLKKIPPPKFLKVALKF | seqid_1488 |
| variant_1959 | KWKLLKKIPPPKFLKVALKF | seqid_1489 |
| variant_1960 | RWKLLKKIPPPKFLKVALKF | seqid_1490 |
| variant_1961 | FWKLLKKIPPPKFLKVALKF | seqid_1491 |
| variant_1962 | KKKKLKKIPPPKFLKVALKF | seqid_1492 |
| variant_1963 | RKKKLKKIPPPKFLKVALKF | seqid_1493 |
| variant_1964 | FKKKLKKIPPPKFLKVALKF | seqid_1494 |
| variant_1965 | KWKKLKKIPPPKFLKVALKF | seqid_1495 |
| variant_1966 | RWKKLKKIPPPKFLKVALKF | seqid_1496 |
| variant_1967 | FWKKLKKIPPPKFLKVALKF | seqid_1497 |
| variant_1968 | KKKLFLKIPPKFLKVALKF | seqid_1498 |
| variant_1969 | RKKLFLKIPPKFLKVALKF | seqid_1499 |
| variant_1970 | FKKLFLKIPPKFLKVALKF | seqid_1500 |
| variant_1971 | KWKLFLKIPPKFLKVALKF | seqid_1501 |
| variant_1972 | RWKLFLKIPPKFLKVALKF | seqid_1502 |
| variant_1973 | FWKLFLKIPPKFLKVALKF | seqid_1503 |
| variant_1974 | KKKKFLKIPPKFLKVALKF | seqid_1504 |
| variant_1975 | RKKKFLKIPPKFLKVALKF | seqid_1505 |
| variant_1976 | FKKKFLKIPPKFLKVALKF | seqid_1506 |
| variant_1977 | KWKKFLKIPPKFLKVALKF | seqid_1507 |
| variant_1978 | RWKKFLKIPPKFLKVALKF | seqid_1508 |
| variant_1979 | FWKKFLKIPPKFLKVALKF | seqid_1509 |
| variant_1980 | KKKLLLKIPPKFLKVALKF | seqid_1510 |
| variant_1981 | RKKLLLKIPPKFLKVALKF | seqid_1511 |
| variant_1982 | FKKLLLKIPPKFLKVALKF | seqid_1512 |
| variant_1983 | KWKLLLKIPPKFLKVALKF | seqid_1513 |
| variant_1984 | RWKLLLKIPPKFLKVALKF | seqid_1514 |
| variant_1985 | FWKLLLKIPPKFLKVALKF | seqid_1515 |
| variant_1986 | KKKKLLKIPPKFLKVALKF | seqid_1516 |
| variant_1987 | RKKKLLKIPPKFLKVALKF | seqid_1517 |
| variant_1988 | FKKKLLKIPPKFLKVALKF | seqid_1518 |
| variant_1989 | KWKKLLKIPPKFLKVALKF | seqid_1519 |
| variant_1990 | RWKKLLKIPPKFLKVALKF | seqid_1520 |
| variant_1991 | FWKKLLKIPPKFLKVALKF | seqid_1521 |
| variant_1992 | KKKLFKKIPPKFLKVALKF | seqid_1522 |
| variant_1993 | RKKLFKKIPPKFLKVALKF | seqid_1523 |
| variant_1994 | FKKLFKKIPPKFLKVALKF | seqid_1524 |
| variant_1995 | KWKLFKKIPPKFLKVALKF | seqid_1525 |
| variant_1996 | RWKLFKKIPPKFLKVALKF | seqid_1526 |
| variant_1997 | FWKLFKKIPPKFLKVALKF | seqid_1527 |
| variant_1998 | KKKKFKKIPPKFLKVALKF | seqid_1528 |
| variant_1999 | RKKKFKKIPPKFLKVALKF | seqid_1529 |
| variant_2000 | FKKKFKKIPPKFLKVALKF | seqid_1530 |
| variant_2001 | KWKKFKKIPPKFLKVALKF | seqid_1531 |
| variant_2002 | RWKKFKKIPPKFLKVALKF | seqid_1532 |
| variant_2003 | FWKKFKKIPPKFLKVALKF | seqid_1533 |
| variant_2004 | KKKLLKKIPPKFLKVALKF | seqid_1534 |
| variant_2005 | RKKLLKKIPPKFLKVALKF | seqid_1535 |
| variant_2006 | FKKLLKKIPPKFLKVALKF | seqid_1536 |
| variant_2007 | KWKLLKKIPPKFLKVALKF | seqid_1537 |
| variant_2008 | RWKLLKKIPPKFLKVALKF | seqid_1538 |
| variant_2009 | FWKLLKKIPPKFLKVALKF | seqid_1539 |
| variant_2010 | KKKKLKKIPPKFLKVALKF | seqid_1540 |
| variant_2011 | RKKKLKKIPPKFLKVALKF | seqid_1541 |
| variant_2012 | FKKKLKKIPPKFLKVALKF | seqid_1542 |
| variant_2013 | KWKKLKKIPPKFLKVALKF | seqid_1543 |
| variant_2014 | RWKKLKKIPPKFLKVALKF | seqid_1544 |
| variant_2015 | FWKKLKKIPPKFLKVALKF | seqid_1545 |
| variant_2064 | KKKLFLKIPKFLKVALKF | seqid_1546 |
| variant_2065 | RKKLFLKIPKFLKVALKF | seqid_1547 |
| variant_2066 | FKKLFLKIPKFLKVALKF | seqid_1548 |
| variant_2067 | KWKLFLKIPKFLKVALKF | seqid_1549 |
| variant_2068 | RWKLFLKIPKFLKVALKF | seqid_1550 |
| variant_2069 | FWKLFLKIPKFLKVALKF | seqid_1551 |
| variant_2070 | KKKKFLKIPKFLKVALKF | seqid_1552 |
| variant_2071 | RKKKFLKIPKFLKVALKF | seqid_1553 |
| variant_2072 | FKKKFLKIPKFLKVALKF | seqid_1554 |
| variant_2073 | KWKKFLKIPKFLKVALKF | seqid_1555 |
| variant_2074 | RWKKFLKIPKFLKVALKF | seqid_1556 |
| variant_2075 | FWKKFLKIPKFLKVALKF | seqid_1557 |
| variant_2076 | KKKLLLKIPKFLKVALKF | seqid_1558 |
| variant_2077 | RKKLLLKIPKFLKVALKF | seqid_1559 |
| variant_2078 | FKKLLLKIPKFLKVALKF | seqid_1560 |
| variant_2079 | KWKLLLKIPKFLKVALKF | seqid_1561 |
| variant_2080 | RWKLLLKIPKFLKVALKF | seqid_1562 |
| variant_2081 | FWKLLLKIPKFLKVALKF | seqid_1563 |
| variant_2082 | KKKKLLKIPKFLKVALKF | seqid_1564 |
| variant_2083 | RKKKLLKIPKFLKVALKF | seqid_1565 |
| variant_2084 | FKKKLLKIPKFLKVALKF | seqid_1566 |
| variant_2085 | KWKKLLKIPKFLKVALKF | seqid_1567 |
| variant_2086 | RWKKLLKIPKFLKVALKF | seqid_1568 |
| variant_2087 | FWKKLLKIPKFLKVALKF | seqid_1569 |
| variant_2088 | KKKLFKKIPKFLKVALKF | seqid_1570 |
| variant_2089 | RKKLFKKIPKFLKVALKF | seqid_1571 |
| variant_2090 | FKKLFKKIPKFLKVALKF | seqid_1572 |
| variant_2091 | KWKLFKKIPKFLKVALKF | seqid_1573 |
| variant_2092 | RWKLFKKIPKFLKVALKF | seqid_1574 |
| variant_2093 | FWKLFKKIPKFLKVALKF | seqid_1575 |
| variant_2094 | KKKKFKKIPKFLKVALKF | seqid_1576 |
| variant_2095 | RKKKFKKIPKFLKVALKF | seqid_1577 |
| variant_2096 | FKKKFKKIPKFLKVALKF | seqid_1578 |
| variant_2097 | KWKKFKKIPKFLKVALKF | seqid_1579 |
| variant_2098 | RWKKFKKIPKFLKVALKF | seqid_1580 |
| variant_2099 | FWKKFKKIPKFLKVALKF | seqid_1581 |
| variant_2100 | KKKLLKKIPKFLKVALKF | seqid_1582 |
| variant_2101 | RKKLLKKIPKFLKVALKF | seqid_1583 |
| variant_2102 | FKKLLKKIPKFLKVALKF | seqid_1584 |
| variant_2103 | KWKLLKKIPKFLKVALKF | seqid_1585 |
| variant_2104 | RWKLLKKIPKFLKVALKF | seqid_1586 |
| variant_2105 | FWKLLKKIPKFLKVALKF | seqid_1587 |
| variant_2106 | KKKKLKKIPKFLKVALKF | seqid_1588 |
| variant_2107 | RKKKLKKIPKFLKVALKF | seqid_1589 |
| variant_2108 | FKKKLKKIPKFLKVALKF | seqid_1590 |
| variant_2109 | KWKKLKKIPKFLKVALKF | seqid_1591 |
| variant_2110 | RWKKLKKIPKFLKVALKF | seqid_1592 |
| variant_2111 | FWKKLKKIPKFLKVALKF | seqid_1593 |
| variant_2112 | KKKLFLKIPPPKFKKVALKF | seqid_1594 |
| variant_2113 | RKKLFLKIPPPKFKKVALKF | seqid_1595 |
| variant_2114 | FKKLFLKIPPPKFKKVALKF | seqid_1596 |
| variant_2115 | KWKLFLKIPPPKFKKVALKF | seqid_1597 |
| variant_2116 | RWKLFLKIPPPKFKKVALKF | seqid_1598 |
| variant_2117 | FWKLFLKIPPPKFKKVALKF | seqid_1599 |
| variant_2118 | KKKKFLKIPPPKFKKVALKF | seqid_1600 |
| variant_2119 | RKKKFLKIPPPKFKKVALKF | seqid_1601 |
| variant_2120 | FKKKFLKIPPPKFKKVALKF | seqid_1602 |
| variant_2121 | KWKKFLKIPPPKFKKVALKF | seqid_1603 |
| variant_2122 | RWKKFLKIPPPKFKKVALKF | seqid_1604 |
| variant_2123 | FWKKFLKIPPPKFKKVALKF | seqid_1605 |
| variant_2124 | KKKLLLKIPPPKFKKVALKF | seqid_1606 |
| variant_2125 | RKKLLLKIPPPKFKKVALKF | seqid_1607 |
| variant_2126 | FKKLLLKIPPPKFKKVALKF | seqid_1608 |
| variant_2127 | KWKLLLKIPPPKFKKVALKF | seqid_1609 |
| variant_2128 | RWKLLLKIPPPKFKKVALKF | seqid_1610 |
| variant_2129 | FWKLLLKIPPPKFKKVALKF | seqid_1611 |
| variant_2130 | KKKKLLKIPPPKFKKVALKF | seqid_1612 |
| variant_2131 | RKKKLLKIPPPKFKKVALKF | seqid_1613 |
| variant_2132 | FKKKLLKIPPPKFKKVALKF | seqid_1614 |
| variant_2133 | KWKKLLKIPPPKFKKVALKF | seqid_1615 |
| variant_2134 | RWKKLLKIPPPKFKKVALKF | seqid_1616 |
| variant_2135 | FWKKLLKIPPPKFKKVALKF | seqid_1617 |
| variant_2136 | KKKLFKKIPPPKFKKVALKF | seqid_1618 |
| variant_2137 | RKKLFKKIPPPKFKKVALKF | seqid_1619 |
| variant_2138 | FKKLFKKIPPPKFKKVALKF | seqid_1620 |
| variant_2139 | KWKLFKKIPPPKFKKVALKF | seqid_1621 |
| variant_2140 | RWKLFKKIPPPKFKKVALKF | seqid_1622 |
| variant_2141 | FWKLFKKIPPPKFKKVALKF | seqid_1623 |
| variant_2142 | KKKKFKKIPPPKFKKVALKF | seqid_1624 |
| variant_2143 | RKKKFKKIPPPKFKKVALKF | seqid_1625 |
| variant_2144 | FKKKFKKIPPPKFKKVALKF | seqid_1626 |
| variant_2145 | KWKKFKKIPPPKFKKVALKF | seqid_1627 |
| variant_2146 | RWKKFKKIPPPKFKKVALKF | seqid_1628 |
| variant_2147 | FWKKFKKIPPPKFKKVALKF | seqid_1629 |
| variant_2148 | KKKLLKKIPPPKFKKVALKF | seqid_1630 |
| variant_2149 | RKKLLKKIPPPKFKKVALKF | seqid_1631 |
| variant_2150 | FKKLLKKIPPPKFKKVALKF | seqid_1632 |
| variant_2151 | KWKLLKKIPPPKFKKVALKF | seqid_1633 |
| variant_2152 | RWKLLKKIPPPKFKKVALKF | seqid_1634 |
| variant_2153 | FWKLLKKIPPPKFKKVALKF | seqid_1635 |
| variant_2154 | KKKKLKKIPPPKFKKVALKF | seqid_1636 |
| variant_2155 | RKKKLKKIPPPKFKKVALKF | seqid_1637 |
| variant_2156 | FKKKLKKIPPPKFKKVALKF | seqid_1638 |
| variant_2157 | KWKKLKKIPPPKFKKVALKF | seqid_1639 |
| variant_2158 | RWKKLKKIPPPKFKKVALKF | seqid_1640 |
| variant_2159 | FWKKLKKIPPPKFKKVALKF | seqid_1641 |
| variant_2160 | KKKLFLKIPPKFKKVALKF | seqid_1642 |
| variant_2161 | RKKLFLKIPPKFKKVALKF | seqid_1643 |
| variant_2162 | FKKLFLKIPPKFKKVALKF | seqid_1644 |
| variant_2163 | KWKLFLKIPPKFKKVALKF | seqid_1645 |
| variant_2164 | RWKLFLKIPPKFKKVALKF | seqid_1646 |
| variant_2165 | FWKLFLKIPPKFKKVALKF | seqid_1647 |
| variant_2166 | KKKKFLKIPPKFKKVALKF | seqid_1648 |
| variant_2167 | RKKKFLKIPPKFKKVALKF | seqid_1649 |
| variant_2168 | FKKKFLKIPPKFKKVALKF | seqid_1650 |
| variant_2169 | KWKKFLKIPPKFKKVALKF | seqid_1651 |
| variant_2170 | RWKKFLKIPPKFKKVALKF | seqid_1652 |
| variant_2171 | FWKKFLKIPPKFKKVALKF | seqid_1653 |
| variant_2172 | KKKLLLKIPPKFKKVALKF | seqid_1654 |
| variant_2173 | RKKLLLKIPPKFKKVALKF | seqid_1655 |
| variant_2174 | FKKLLLKIPPKFKKVALKF | seqid_1656 |
| variant_2175 | KWKLLLKIPPKFKKVALKF | seqid_1657 |
| variant_2176 | RWKLLLKIPPKFKKVALKF | seqid_1658 |
| variant_2177 | FWKLLLKIPPKFKKVALKF | seqid_1659 |
| variant_2178 | KKKKLLKIPPKFKKVALKF | seqid_1660 |
| variant_2179 | RKKKLLKIPPKFKKVALKF | seqid_1661 |
| variant_2180 | FKKKLLKIPPKFKKVALKF | seqid_1662 |
| variant_2181 | KWKKLLKIPPKFKKVALKF | seqid_1663 |
| variant_2182 | RWKKLLKIPPKFKKVALKF | seqid_1664 |
| variant_2183 | FWKKLLKIPPKFKKVALKF | seqid_1665 |
| variant_2184 | KKKLFKKIPPKFKKVALKF | seqid_1666 |
| variant_2185 | RKKLFKKIPPKFKKVALKF | seqid_1667 |
| variant_2186 | FKKLFKKIPPKFKKVALKF | seqid_1668 |
| variant_2187 | KWKLFKKIPPKFKKVALKF | seqid_1669 |
| variant_2188 | RWKLFKKIPPKFKKVALKF | seqid_1670 |
| variant_2189 | FWKLFKKIPPKFKKVALKF | seqid_1671 |
| variant_2190 | KKKKFKKIPPKFKKVALKF | seqid_1672 |
| variant_2191 | RKKKFKKIPPKFKKVALKF | seqid_1673 |
| variant_2192 | FKKKFKKIPPKFKKVALKF | seqid_1674 |
| variant_2193 | KWKKFKKIPPKFKKVALKF | seqid_1675 |
| variant_2194 | RWKKFKKIPPKFKKVALKF | seqid_1676 |
| variant_2195 | FWKKFKKIPPKFKKVALKF | seqid_1677 |
| variant_2196 | KKKLLKKIPPKFKKVALKF | seqid_1678 |
| variant_2197 | RKKLLKKIPPKFKKVALKF | seqid_1679 |
| variant_2198 | FKKLLKKIPPKFKKVALKF | seqid_1680 |
| variant_2199 | KWKLLKKIPPKFKKVALKF | seqid_1681 |
| variant_2200 | RWKLLKKIPPKFKKVALKF | seqid_1682 |
| variant_2201 | FWKLLKKIPPKFKKVALKF | seqid_1683 |
| variant_2202 | KKKKLKKIPPKFKKVALKF | seqid_1684 |
| variant_2203 | RKKKLKKIPPKFKKVALKF | seqid_1685 |
| variant_2204 | FKKKLKKIPPKFKKVALKF | seqid_1686 |
| variant_2205 | KWKKLKKIPPKFKKVALKF | seqid_1687 |
| variant_2206 | RWKKLKKIPPKFKKVALKF | seqid_1688 |
| variant_2207 | FWKKLKKIPPKFKKVALKF | seqid_1689 |
| variant_2256 | KKKLFLKIPKFKKVALKF | seqid_1690 |
| variant_2257 | RKKLFLKIPKFKKVALKF | seqid_1691 |
| variant_2258 | FKKLFLKIPKFKKVALKF | seqid_1692 |
| variant_2259 | KWKLFLKIPKFKKVALKF | seqid_1693 |
| variant_2260 | RWKLFLKIPKFKKVALKF | seqid_1694 |
| variant_2261 | FWKLFLKIPKFKKVALKF | seqid_1695 |
| variant_2262 | KKKKFLKIPKFKKVALKF | seqid_1696 |
| variant_2263 | RKKKFLKIPKFKKVALKF | seqid_1697 |
| variant_2264 | FKKKFLKIPKFKKVALKF | seqid_1698 |
| variant_2265 | KWKKFLKIPKFKKVALKF | seqid_1699 |
| variant_2266 | RWKKFLKIPKFKKVALKF | seqid_1700 |
| variant_2267 | FWKKFLKIPKFKKVALKF | seqid_1701 |
| variant_2268 | KKKLLLKIPKFKKVALKF | seqid_1702 |
| variant_2269 | RKKLLLKIPKFKKVALKF | seqid_1703 |
| variant_2270 | FKKLLLKIPKFKKVALKF | seqid_1704 |
| variant_2271 | KWKLLLKIPKFKKVALKF | seqid_1705 |
| variant_2272 | RWKLLLKIPKFKKVALKF | seqid_1706 |
| variant_2273 | FWKLLLKIPKFKKVALKF | seqid_1707 |
| variant_2274 | KKKKLLKIPKFKKVALKF | seqid_1708 |
| variant_2275 | RKKKLLKIPKFKKVALKF | seqid_1709 |
| variant_2276 | FKKKLLKIPKFKKVALKF | seqid_1710 |
| variant_2277 | KWKKLLKIPKFKKVALKF | seqid_1711 |
| variant_2278 | RWKKLLKIPKFKKVALKF | seqid_1712 |
| variant_2279 | FWKKLLKIPKFKKVALKF | seqid_1713 |
| variant_2280 | KKKLFKKIPKFKKVALKF | seqid_1714 |
| variant_2281 | RKKLFKKIPKFKKVALKF | seqid_1715 |
| variant_2282 | FKKLFKKIPKFKKVALKF | seqid_1716 |
| variant_2283 | KWKLFKKIPKFKKVALKF | seqid_1717 |
| variant_2284 | RWKLFKKIPKFKKVALKF | seqid_1718 |
| variant_2285 | FWKLFKKIPKFKKVALKF | seqid_1719 |
| variant_2286 | KKKKFKKIPKFKKVALKF | seqid_1720 |
| variant_2287 | RKKKFKKIPKFKKVALKF | seqid_1721 |
| variant_2288 | FKKKFKKIPKFKKVALKF | seqid_1722 |
| variant_2289 | KWKKFKKIPKFKKVALKF | seqid_1723 |
| variant_2290 | RWKKFKKIPKFKKVALKF | seqid_1724 |
| variant_2291 | FWKKFKKIPKFKKVALKF | seqid_1725 |
| variant_2292 | KKKLLKKIPKFKKVALKF | seqid_1726 |
| variant_2293 | RKKLLKKIPKFKKVALKF | seqid_1727 |
| variant_2294 | FKKLLKKIPKFKKVALKF | seqid_1728 |
| variant_2295 | KWKLLKKIPKFKKVALKF | seqid_1729 |
| variant_2296 | RWKLLKKIPKFKKVALKF | seqid_1730 |
| variant_2297 | FWKLLKKIPKFKKVALKF | seqid_1731 |
| variant_2298 | KKKKLKKIPKFKKVALKF | seqid_1732 |
| variant_2299 | RKKKLKKIPKFKKVALKF | seqid_1733 |
| variant_2300 | FKKKLKKIPKFKKVALKF | seqid_1734 |
| variant_2301 | KWKKLKKIPKFKKVALKF | seqid_1735 |
| variant_2302 | RWKKLKKIPKFKKVALKF | seqid_1736 |
| variant_2303 | FWKKLKKIPKFKKVALKF | seqid_1737 |
| variant_2304 | KKKLFLKIPPPKFLHSALKF | seqid_1738 |
| variant_2305 | RKKLFLKIPPPKFLHSALKF | seqid_1739 |
| variant_2306 | FKKLFLKIPPPKFLHSALKF | seqid_1740 |
| variant_2307 | KWKLFLKIPPPKFLHSALKF | seqid_1741 |
| variant_2308 | RWKLFLKIPPPKFLHSALKF | seqid_1742 |
| variant_2309 | FWKLFLKIPPPKFLHSALKF | seqid_1743 |
| variant_2310 | KKKKFLKIPPPKFLHSALKF | seqid_1744 |
| variant_2311 | RKKKFLKIPPPKFLHSALKF | seqid_1745 |
| variant_2312 | FKKKFLKIPPPKFLHSALKF | seqid_1746 |
| variant_2313 | KWKKFLKIPPPKFLHSALKF | seqid_1747 |
| variant_2314 | RWKKFLKIPPPKFLHSALKF | seqid_1748 |
| variant_2315 | FWKKFLKIPPPKFLHSALKF | seqid_1749 |
| variant_2316 | KKKLLLKIPPPKFLHSALKF | seqid_1750 |
| variant_2317 | RKKLLLKIPPPKFLHSALKF | seqid_1751 |
| variant_2318 | FKKLLLKIPPPKFLHSALKF | seqid_1752 |
| variant_2319 | KWKLLLKIPPPKFLHSALKF | seqid_1753 |
| variant_2320 | RWKLLLKIPPPKFLHSALKF | seqid_1754 |
| variant_2321 | FWKLLLKIPPPKFLHSALKF | seqid_1755 |
| variant_2322 | KKKKLLKIPPPKFLHSALKF | seqid_1756 |
| variant_2323 | RKKKLLKIPPPKFLHSALKF | seqid_1757 |
| variant_2324 | FKKKLLKIPPPKFLHSALKF | seqid_1758 |
| variant_2325 | KWKKLLKIPPPKFLHSALKF | seqid_1759 |
| variant_2326 | RWKKLLKIPPPKFLHSALKF | seqid_1760 |
| variant_2327 | FWKKLLKIPPPKFLHSALKF | seqid_1761 |
| variant_2328 | KKKLFKKIPPPKFLHSALKF | seqid_1762 |
| variant_2329 | RKKLFKKIPPPKFLHSALKF | seqid_1763 |
| variant_2330 | FKKLFKKIPPPKFLHSALKF | seqid_1764 |
| variant_2331 | KWKLFKKIPPPKFLHSALKF | seqid_1765 |
| variant_2332 | RWKLFKKIPPPKFLHSALKF | seqid_1766 |
| variant_2333 | FWKLFKKIPPPKFLHSALKF | seqid_1767 |
| variant_2334 | KKKKFKKIPPPKFLHSALKF | seqid_1768 |
| variant_2335 | RKKKFKKIPPPKFLHSALKF | seqid_1769 |
| variant_2336 | FKKKFKKIPPPKFLHSALKF | seqid_1770 |
| variant_2337 | KWKKFKKIPPPKFLHSALKF | seqid_1771 |
| variant_2338 | RWKKFKKIPPPKFLHSALKF | seqid_1772 |
| variant_2339 | FWKKFKKIPPPKFLHSALKF | seqid_1773 |
| variant_2340 | KKKLLKKIPPPKFLHSALKF | seqid_1774 |
| variant_2341 | RKKLLKKIPPPKFLHSALKF | seqid_1775 |
| variant_2342 | FKKLLKKIPPPKFLHSALKF | seqid_1776 |
| variant_2343 | KWKLLKKIPPPKFLHSALKF | seqid_1777 |
| variant_2344 | RWKLLKKIPPPKFLHSALKF | seqid_1778 |
| variant_2345 | FWKLLKKIPPPKFLHSALKF | seqid_1779 |
| variant_2346 | KKKKLKKIPPPKFLHSALKF | seqid_1780 |
| variant_2347 | RKKKLKKIPPPKFLHSALKF | seqid_1781 |
| variant_2348 | FKKKLKKIPPPKFLHSALKF | seqid_1782 |
| variant_2349 | KWKKLKKIPPPKFLHSALKF | seqid_1783 |
| variant_2350 | RWKKLKKIPPPKFLHSALKF | seqid_1784 |
| variant_2351 | FWKKLKKIPPPKFLHSALKF | seqid_1785 |
| variant_2352 | KKKLFLKIPPKFLHSALKF | seqid_1786 |
| variant_2353 | RKKLFLKIPPKFLHSALKF | seqid_1787 |
| variant_2354 | FKKLFLKIPPKFLHSALKF | seqid_1788 |
| variant_2355 | KWKLFLKIPPKFLHSALKF | seqid_1789 |
| variant_2356 | RWKLFLKIPPKFLHSALKF | seqid_1790 |
| variant_2357 | FWKLFLKIPPKFLHSALKF | seqid_1791 |
| variant_2358 | KKKKFLKIPPKFLHSALKF | seqid_1792 |
| variant_2359 | RKKKFLKIPPKFLHSALKF | seqid_1793 |
| variant_2360 | FKKKFLKIPPKFLHSALKF | seqid_1794 |
| variant_2361 | KWKKFLKIPPKFLHSALKF | seqid_1795 |
| variant_2362 | RWKKFLKIPPKFLHSALKF | seqid_1796 |
| variant_2363 | FWKKFLKIPPKFLHSALKF | seqid_1797 |
| variant_2364 | KKKLLLKIPPKFLHSALKF | seqid_1798 |
| variant_2365 | RKKLLLKIPPKFLHSALKF | seqid_1799 |
| variant_2366 | FKKLLLKIPPKFLHSALKF | seqid_1800 |
| variant_2367 | KWKLLLKIPPKFLHSALKF | seqid_1801 |
| variant_2368 | RWKLLLKIPPKFLHSALKF | seqid_1802 |
| variant_2369 | FWKLLLKIPPKFLHSALKF | seqid_1803 |
| variant_2370 | KKKKLLKIPPKFLHSALKF | seqid_1804 |
| variant_2371 | RKKKLLKIPPKFLHSALKF | seqid_1805 |
| variant_2372 | FKKKLLKIPPKFLHSALKF | seqid_1806 |
| variant_2373 | KWKKLLKIPPKFLHSALKF | seqid_1807 |
| variant_2374 | RWKKLLKIPPKFLHSALKF | seqid_1808 |
| variant_2375 | FWKKLLKIPPKFLHSALKF | seqid_1809 |
| variant_2376 | KKKLFKKIPPKFLHSALKF | seqid_1810 |
| variant_2377 | RKKLFKKIPPKFLHSALKF | seqid_1811 |
| variant_2378 | FKKLFKKIPPKFLHSALKF | seqid_1812 |
| variant_2379 | KWKLFKKIPPKFLHSALKF | seqid_1813 |
| variant_2380 | RWKLFKKIPPKFLHSALKF | seqid_1814 |
| variant_2381 | FWKLFKKIPPKFLHSALKF | seqid_1815 |
| variant_2382 | KKKKFKKIPPKFLHSALKF | seqid_1816 |
| variant_2383 | RKKKFKKIPPKFLHSALKF | seqid_1817 |
| variant_2384 | FKKKFKKIPPKFLHSALKF | seqid_1818 |
| variant_2385 | KWKKFKKIPPKFLHSALKF | seqid_1819 |
| variant_2386 | RWKKFKKIPPKFLHSALKF | seqid_1820 |
| variant_2387 | FWKKFKKIPPKFLHSALKF | seqid_1821 |
| variant_2388 | KKKLLKKIPPKFLHSALKF | seqid_1822 |
| variant_2389 | RKKLLKKIPPKFLHSALKF | seqid_1823 |
| variant_2390 | FKKLLKKIPPKFLHSALKF | seqid_1824 |
| variant_2391 | KWKLLKKIPPKFLHSALKF | seqid_1825 |
| variant_2392 | RWKLLKKIPPKFLHSALKF | seqid_1826 |
| variant_2393 | FWKLLKKIPPKFLHSALKF | seqid_1827 |
| variant_2394 | KKKKLKKIPPKFLHSALKF | seqid_1828 |
| variant_2395 | RKKKLKKIPPKFLHSALKF | seqid_1829 |
| variant_2396 | FKKKLKKIPPKFLHSALKF | seqid_1830 |
| variant_2397 | KWKKLKKIPPKFLHSALKF | seqid_1831 |
| variant_2398 | RWKKLKKIPPKFLHSALKF | seqid_1832 |
| variant_2399 | FWKKLKKIPPKFLHSALKF | seqid_1833 |
| variant_2448 | KKKLFLKIPKFLHSALKF | seqid_1834 |
| variant_2449 | RKKLFLKIPKFLHSALKF | seqid_1835 |
| variant_2450 | FKKLFLKIPKFLHSALKF | seqid_1836 |
| variant_2451 | KWKLFLKIPKFLHSALKF | seqid_1837 |
| variant_2452 | RWKLFLKIPKFLHSALKF | seqid_1838 |
| variant_2453 | FWKLFLKIPKFLHSALKF | seqid_1839 |
| variant_2454 | KKKKFLKIPKFLHSALKF | seqid_1840 |
| variant_2455 | RKKKFLKIPKFLHSALKF | seqid_1841 |
| variant_2456 | FKKKFLKIPKFLHSALKF | seqid_1842 |
| variant_2457 | KWKKFLKIPKFLHSALKF | seqid_1843 |
| variant_2458 | RWKKFLKIPKFLHSALKF | seqid_1844 |
| variant_2459 | FWKKFLKIPKFLHSALKF | seqid_1845 |
| variant_2460 | KKKLLLKIPKFLHSALKF | seqid_1846 |
| variant_2461 | RKKLLLKIPKFLHSALKF | seqid_1847 |
| variant_2462 | FKKLLLKIPKFLHSALKF | seqid_1848 |
| variant_2463 | KWKLLLKIPKFLHSALKF | seqid_1849 |
| variant_2464 | RWKLLLKIPKFLHSALKF | seqid_1850 |
| variant_2465 | FWKLLLKIPKFLHSALKF | seqid_1851 |
| variant_2466 | KKKKLLKIPKFLHSALKF | seqid_1852 |
| variant_2467 | RKKKLLKIPKFLHSALKF | seqid_1853 |
| variant_2468 | FKKKLLKIPKFLHSALKF | seqid_1854 |
| variant_2469 | KWKKLLKIPKFLHSALKF | seqid_1855 |
| variant_2470 | RWKKLLKIPKFLHSALKF | seqid_1856 |
| variant_2471 | FWKKLLKIPKFLHSALKF | seqid_1857 |
| variant_2472 | KKKLFKKIPKFLHSALKF | seqid_1858 |
| variant_2473 | RKKLFKKIPKFLHSALKF | seqid_1859 |
| variant_2474 | FKKLFKKIPKFLHSALKF | seqid_1860 |
| variant_2475 | KWKLFKKIPKFLHSALKF | seqid_1861 |
| variant_2476 | RWKLFKKIPKFLHSALKF | seqid_1862 |
| variant_2477 | FWKLFKKIPKFLHSALKF | seqid_1863 |
| variant_2478 | KKKKFKKIPKFLHSALKF | seqid_1864 |
| variant_2479 | RKKKFKKIPKFLHSALKF | seqid_1865 |
| variant_2480 | FKKKFKKIPKFLHSALKF | seqid_1866 |
| variant_2481 | KWKKFKKIPKFLHSALKF | seqid_1867 |
| variant_2482 | RWKKFKKIPKFLHSALKF | seqid_1868 |
| variant_2483 | FWKKFKKIPKFLHSALKF | seqid_1869 |
| variant_2484 | KKKLLKKIPKFLHSALKF | seqid_1870 |
| variant_2485 | RKKLLKKIPKFLHSALKF | seqid_1871 |
| variant_2486 | FKKLLKKIPKFLHSALKF | seqid_1872 |
| variant_2487 | KWKLLKKIPKFLHSALKF | seqid_1873 |
| variant_2488 | RWKLLKKIPKFLHSALKF | seqid_1874 |
| variant_2489 | FWKLLKKIPKFLHSALKF | seqid_1875 |
| variant_2490 | KKKKLKKIPKFLHSALKF | seqid_1876 |
| variant_2491 | RKKKLKKIPKFLHSALKF | seqid_1877 |
| variant_2492 | FKKKLKKIPKFLHSALKF | seqid_1878 |
| variant_2493 | KWKKLKKIPKFLHSALKF | seqid_1879 |
| variant_2494 | RWKKLKKIPKFLHSALKF | seqid_1880 |
| variant_2495 | FWKKLKKIPKFLHSALKF | seqid_1881 |
| variant_2496 | KKKLFLKIPPPKFKHSALKF | seqid_1882 |
| variant_2497 | RKKLFLKIPPPKFKHSALKF | seqid_1883 |
| variant_2498 | FKKLFLKIPPPKFKHSALKF | seqid_1884 |
| variant_2499 | KWKLFLKIPPPKFKHSALKF | seqid_1885 |
| variant_2500 | RWKLFLKIPPPKFKHSALKF | seqid_1886 |
| variant_2501 | FWKLFLKIPPPKFKHSALKF | seqid_1887 |
| variant_2502 | KKKKFLKIPPPKFKHSALKF | seqid_1888 |
| variant_2503 | RKKKFLKIPPPKFKHSALKF | seqid_1889 |
| variant_2504 | FKKKFLKIPPPKFKHSALKF | seqid_1890 |
| variant_2505 | KWKKFLKIPPPKFKHSALKF | seqid_1891 |
| variant_2506 | RWKKFLKIPPPKFKHSALKF | seqid_1892 |
| variant_2507 | FWKKFLKIPPPKFKHSALKF | seqid_1893 |
| variant_2508 | KKKLLLKIPPPKFKHSALKF | seqid_1894 |
| variant_2509 | RKKLLLKIPPPKFKHSALKF | seqid_1895 |
| variant_2510 | FKKLLLKIPPPKFKHSALKF | seqid_1896 |
| variant_2511 | KWKLLLKIPPPKFKHSALKF | seqid_1897 |
| variant_2512 | RWKLLLKIPPPKFKHSALKF | seqid_1898 |
| variant_2513 | FWKLLLKIPPPKFKHSALKF | seqid_1899 |
| variant_2514 | KKKKLLKIPPPKFKHSALKF | seqid_1900 |
| variant_2515 | RKKKLLKIPPPKFKHSALKF | seqid_1901 |
| variant_2516 | FKKKLLKIPPPKFKHSALKF | seqid_1902 |
| variant_2517 | KWKKLLKIPPPKFKHSALKF | seqid_1903 |
| variant_2518 | RWKKLLKIPPPKFKHSALKF | seqid_1904 |
| variant_2519 | FWKKLLKIPPPKFKHSALKF | seqid_1905 |
| variant_2520 | KKKLFKKIPPPKFKHSALKF | seqid_1906 |
| variant_2521 | RKKLFKKIPPPKFKHSALKF | seqid_1907 |
| variant_2522 | FKKLFKKIPPPKFKHSALKF | seqid_1908 |
| variant_2523 | KWKLFKKIPPPKFKHSALKF | seqid_1909 |
| variant_2524 | RWKLFKKIPPPKFKHSALKF | seqid_1910 |
| variant_2525 | FWKLFKKIPPPKFKHSALKF | seqid_1911 |
| variant_2526 | KKKKFKKIPPPKFKHSALKF | seqid_1912 |
| variant_2527 | RKKKFKKIPPPKFKHSALKF | seqid_1913 |
| variant_2528 | FKKKFKKIPPPKFKHSALKF | seqid_1914 |
| variant_2529 | KWKKFKKIPPPKFKHSALKF | seqid_1915 |
| variant_2530 | RWKKFKKIPPPKFKHSALKF | seqid_1916 |
| variant_2531 | FWKKFKKIPPPKFKHSALKF | seqid_1917 |
| variant_2532 | KKKLLKKIPPPKFKHSALKF | seqid_1918 |
| variant_2533 | RKKLLKKIPPPKFKHSALKF | seqid_1919 |
| variant_2534 | FKKLLKKIPPPKFKHSALKF | seqid_1920 |
| variant_2535 | KWKLLKKIPPPKFKHSALKF | seqid_1921 |
| variant_2536 | RWKLLKKIPPPKFKHSALKF | seqid_1922 |
| variant_2537 | FWKLLKKIPPPKFKHSALKF | seqid_1923 |
| variant_2538 | KKKKLKKIPPPKFKHSALKF | seqid_1924 |
| variant_2539 | RKKKLKKIPPPKFKHSALKF | seqid_1925 |
| variant_2540 | FKKKLKKIPPPKFKHSALKF | seqid_1926 |
| variant_2541 | KWKKLKKIPPPKFKHSALKF | seqid_1927 |
| variant_2542 | RWKKLKKIPPPKFKHSALKF | seqid_1928 |
| variant_2543 | FWKKLKKIPPPKFKHSALKF | seqid_1929 |
| variant_2544 | KKKLFLKIPPKFKHSALKF | seqid_1930 |
| variant_2545 | RKKLFLKIPPKFKHSALKF | seqid_1931 |
| variant_2546 | FKKLFLKIPPKFKHSALKF | seqid_1932 |
| variant_2547 | KWKLFLKIPPKFKHSALKF | seqid_1933 |
| variant_2548 | RWKLFLKIPPKFKHSALKF | seqid_1934 |
| variant_2549 | FWKLFLKIPPKFKHSALKF | seqid_1935 |
| variant_2550 | KKKKFLKIPPKFKHSALKF | seqid_1936 |
| variant_2551 | RKKKFLKIPPKFKHSALKF | seqid_1937 |
| variant_2552 | FKKKFLKIPPKFKHSALKF | seqid_1938 |
| variant_2553 | KWKKFLKIPPKFKHSALKF | seqid_1939 |
| variant_2554 | RWKKFLKIPPKFKHSALKF | seqid_1940 |
| variant_2555 | FWKKFLKIPPKFKHSALKF | seqid_1941 |
| variant_2556 | KKKLLLKIPPKFKHSALKF | seqid_1942 |
| variant_2557 | RKKLLLKIPPKFKHSALKF | seqid_1943 |
| variant_2558 | FKKLLLKIPPKFKHSALKF | seqid_1944 |
| variant_2559 | KWKLLLKIPPKFKHSALKF | seqid_1945 |
| variant_2560 | RWKLLLKIPPKFKHSALKF | seqid_1946 |
| variant_2561 | FWKLLLKIPPKFKHSALKF | seqid_1947 |
| variant_2562 | KKKKLLKIPPKFKHSALKF | seqid_1948 |
| variant_2563 | RKKKLLKIPPKFKHSALKF | seqid_1949 |
| variant_2564 | FKKKLLKIPPKFKHSALKF | seqid_1950 |
| variant_2565 | KWKKLLKIPPKFKHSALKF | seqid_1951 |
| variant_2566 | RWKKLLKIPPKFKHSALKF | seqid_1952 |
| variant_2567 | FWKKLLKIPPKFKHSALKF | seqid_1953 |
| variant_2568 | KKKLFKKIPPKFKHSALKF | seqid_1954 |
| variant_2569 | RKKLFKKIPPKFKHSALKF | seqid_1955 |
| variant_2570 | FKKLFKKIPPKFKHSALKF | seqid_1956 |
| variant_2571 | KWKLFKKIPPKFKHSALKF | seqid_1957 |
| variant_2572 | RWKLFKKIPPKFKHSALKF | seqid_1958 |
| variant_2573 | FWKLFKKIPPKFKHSALKF | seqid_1959 |
| variant_2574 | KKKKFKKIPPKFKHSALKF | seqid_1960 |
| variant_2575 | RKKKFKKIPPKFKHSALKF | seqid_1961 |
| variant_2576 | FKKKFKKIPPKFKHSALKF | seqid_1962 |
| variant_2577 | KWKKFKKIPPKFKHSALKF | seqid_1963 |
| variant_2578 | RWKKFKKIPPKFKHSALKF | seqid_1964 |
| variant_2579 | FWKKFKKIPPKFKHSALKF | seqid_1965 |
| variant_2580 | KKKLLKKIPPKFKHSALKF | seqid_1966 |
| variant_2581 | RKKLLKKIPPKFKHSALKF | seqid_1967 |
| variant_2582 | FKKLLKKIPPKFKHSALKF | seqid_1968 |
| variant_2583 | KWKLLKKIPPKFKHSALKF | seqid_1969 |
| variant_2584 | RWKLLKKIPPKFKHSALKF | seqid_1970 |
| variant_2585 | FWKLLKKIPPKFKHSALKF | seqid_1971 |
| variant_2586 | KKKKLKKIPPKFKHSALKF | seqid_1972 |
| variant_2587 | RKKKLKKIPPKFKHSALKF | seqid_1973 |
| variant_2588 | FKKKLKKIPPKFKHSALKF | seqid_1974 |
| variant_2589 | KWKKLKKIPPKFKHSALKF | seqid_1975 |
| variant_2590 | RWKKLKKIPPKFKHSALKF | seqid_1976 |
| variant_2591 | FWKKLKKIPPKFKHSALKF | seqid_1977 |
| variant_2640 | KKKLFLKIPKFKHSALKF | seqid_1978 |
| variant_2641 | RKKLFLKIPKFKHSALKF | seqid_1979 |
| variant_2642 | FKKLFLKIPKFKHSALKF | seqid_1980 |
| variant_2643 | KWKLFLKIPKFKHSALKF | seqid_1981 |
| variant_2644 | RWKLFLKIPKFKHSALKF | seqid_1982 |
| variant_2645 | FWKLFLKIPKFKHSALKF | seqid_1983 |
| variant_2646 | KKKKFLKIPKFKHSALKF | seqid_1984 |
| variant_2647 | RKKKFLKIPKFKHSALKF | seqid_1985 |
| variant_2648 | FKKKFLKIPKFKHSALKF | seqid_1986 |
| variant_2649 | KWKKFLKIPKFKHSALKF | seqid_1987 |
| variant_2650 | RWKKFLKIPKFKHSALKF | seqid_1988 |
| variant_2651 | FWKKFLKIPKFKHSALKF | seqid_1989 |
| variant_2652 | KKKLLLKIPKFKHSALKF | seqid_1990 |
| variant_2653 | RKKLLLKIPKFKHSALKF | seqid_1991 |
| variant_2654 | FKKLLLKIPKFKHSALKF | seqid_1992 |
| variant_2655 | KWKLLLKIPKFKHSALKF | seqid_1993 |
| variant_2656 | RWKLLLKIPKFKHSALKF | seqid_1994 |
| variant_2657 | FWKLLLKIPKFKHSALKF | seqid_1995 |
| variant_2658 | KKKKLLKIPKFKHSALKF | seqid_1996 |
| variant_2659 | RKKKLLKIPKFKHSALKF | seqid_1997 |
| variant_2660 | FKKKLLKIPKFKHSALKF | seqid_1998 |
| variant_2661 | KWKKLLKIPKFKHSALKF | seqid_1999 |
| variant_2662 | RWKKLLKIPKFKHSALKF | seqid_2000 |
| variant_2663 | FWKKLLKIPKFKHSALKF | seqid_2001 |
| variant_2664 | KKKLFKKIPKFKHSALKF | seqid_2002 |
| variant_2665 | RKKLFKKIPKFKHSALKF | seqid_2003 |
| variant_2666 | FKKLFKKIPKFKHSALKF | seqid_2004 |
| variant_2667 | KWKLFKKIPKFKHSALKF | seqid_2005 |
| variant_2668 | RWKLFKKIPKFKHSALKF | seqid_2006 |
| variant_2669 | FWKLFKKIPKFKHSALKF | seqid_2007 |
| variant_2670 | KKKKFKKIPKFKHSALKF | seqid_2008 |
| variant_2671 | RKKKFKKIPKFKHSALKF | seqid_2009 |
| variant_2672 | FKKKFKKIPKFKHSALKF | seqid_2010 |
| variant_2673 | KWKKFKKIPKFKHSALKF | seqid_2011 |
| variant_2674 | RWKKFKKIPKFKHSALKF | seqid_2012 |
| variant_2675 | FWKKFKKIPKFKHSALKF | seqid_2013 |
| variant_2676 | KKKLLKKIPKFKHSALKF | seqid_2014 |
| variant_2677 | RKKLLKKIPKFKHSALKF | seqid_2015 |
| variant_2678 | FKKLLKKIPKFKHSALKF | seqid_2016 |
| variant_2679 | KWKLLKKIPKFKHSALKF | seqid_2017 |
| variant_2680 | RWKLLKKIPKFKHSALKF | seqid_2018 |
| variant_2681 | FWKLLKKIPKFKHSALKF | seqid_2019 |
| variant_2682 | KKKKLKKIPKFKHSALKF | seqid_2020 |
| variant_2683 | RKKKLKKIPKFKHSALKF | seqid_2021 |
| variant_2684 | FKKKLKKIPKFKHSALKF | seqid_2022 |
| variant_2685 | KWKKLKKIPKFKHSALKF | seqid_2023 |
| variant_2686 | RWKKLKKIPKFKHSALKF | seqid_2024 |
| variant_2687 | FWKKLKKIPKFKHSALKF | seqid_2025 |
| variant_2688 | KKKLFLKIPPPKFLKSALKF | seqid_2026 |
| variant_2689 | RKKLFLKIPPPKFLKSALKF | seqid_2027 |
| variant_2690 | FKKLFLKIPPPKFLKSALKF | seqid_2028 |
| variant_2691 | KWKLFLKIPPPKFLKSALKF | seqid_2029 |
| variant_2692 | RWKLFLKIPPPKFLKSALKF | seqid_2030 |
| variant_2693 | FWKLFLKIPPPKFLKSALKF | seqid_2031 |
| variant_2694 | KKKKFLKIPPPKFLKSALKF | seqid_2032 |
| variant_2695 | RKKKFLKIPPPKFLKSALKF | seqid_2033 |
| variant_2696 | FKKKFLKIPPPKFLKSALKF | seqid_2034 |
| variant_2697 | KWKKFLKIPPPKFLKSALKF | seqid_2035 |
| variant_2698 | RWKKFLKIPPPKFLKSALKF | seqid_2036 |
| variant_2699 | FWKKFLKIPPPKFLKSALKF | seqid_2037 |
| variant_2700 | KKKLLLKIPPPKFLKSALKF | seqid_2038 |
| variant_2701 | RKKLLLKIPPPKFLKSALKF | seqid_2039 |
| variant_2702 | FKKLLLKIPPPKFLKSALKF | seqid_2040 |
| variant_2703 | KWKLLLKIPPPKFLKSALKF | seqid_2041 |
| variant_2704 | RWKLLLKIPPPKFLKSALKF | seqid_2042 |
| variant_2705 | FWKLLLKIPPPKFLKSALKF | seqid_2043 |
| variant_2706 | KKKKLLKIPPPKFLKSALKF | seqid_2044 |
| variant_2707 | RKKKLLKIPPPKFLKSALKF | seqid_2045 |
| variant_2708 | FKKKLLKIPPPKFLKSALKF | seqid_2046 |
| variant_2709 | KWKKLLKIPPPKFLKSALKF | seqid_2047 |
| variant_2710 | RWKKLLKIPPPKFLKSALKF | seqid_2048 |
| variant_2711 | FWKKLLKIPPPKFLKSALKF | seqid_2049 |
| variant_2712 | KKKLFKKIPPPKFLKSALKF | seqid_2050 |
| variant_2713 | RKKLFKKIPPPKFLKSALKF | seqid_2051 |
| variant_2714 | FKKLFKKIPPPKFLKSALKF | seqid_2052 |
| variant_2715 | KWKLFKKIPPPKFLKSALKF | seqid_2053 |
| variant_2716 | RWKLFKKIPPPKFLKSALKF | seqid_2054 |
| variant_2717 | FWKLFKKIPPPKFLKSALKF | seqid_2055 |
| variant_2718 | KKKKFKKIPPPKFLKSALKF | seqid_2056 |
| variant_2719 | RKKKFKKIPPPKFLKSALKF | seqid_2057 |
| variant_2720 | FKKKFKKIPPPKFLKSALKF | seqid_2058 |
| variant_2721 | KWKKFKKIPPPKFLKSALKF | seqid_2059 |
| variant_2722 | RWKKFKKIPPPKFLKSALKF | seqid_2060 |
| variant_2723 | FWKKFKKIPPPKFLKSALKF | seqid_2061 |
| variant_2724 | KKKLLKKIPPPKFLKSALKF | seqid_2062 |
| variant_2725 | RKKLLKKIPPPKFLKSALKF | seqid_2063 |
| variant_2726 | FKKLLKKIPPPKFLKSALKF | seqid_2064 |
| variant_2727 | KWKLLKKIPPPKFLKSALKF | seqid_2065 |
| variant_2728 | RWKLLKKIPPPKFLKSALKF | seqid_2066 |
| variant_2729 | FWKLLKKIPPPKFLKSALKF | seqid_2067 |
| variant_2730 | KKKKLKKIPPPKFLKSALKF | seqid_2068 |
| variant_2731 | RKKKLKKIPPPKFLKSALKF | seqid_2069 |
| variant_2732 | FKKKLKKIPPPKFLKSALKF | seqid_2070 |
| variant_2733 | KWKKLKKIPPPKFLKSALKF | seqid_2071 |
| variant_2734 | RWKKLKKIPPPKFLKSALKF | seqid_2072 |
| variant_2735 | FWKKLKKIPPPKFLKSALKF | seqid_2073 |
| variant_2736 | KKKLFLKIPPKFLKSALKF | seqid_2074 |
| variant_2737 | RKKLFLKIPPKFLKSALKF | seqid_2075 |
| variant_2738 | FKKLFLKIPPKFLKSALKF | seqid_2076 |
| variant_2739 | KWKLFLKIPPKFLKSALKF | seqid_2077 |
| variant_2740 | RWKLFLKIPPKFLKSALKF | seqid_2078 |
| variant_2741 | FWKLFLKIPPKFLKSALKF | seqid_2079 |
| variant_2742 | KKKKFLKIPPKFLKSALKF | seqid_2080 |
| variant_2743 | RKKKFLKIPPKFLKSALKF | seqid_2081 |
| variant_2744 | FKKKFLKIPPKFLKSALKF | seqid_2082 |
| variant_2745 | KWKKFLKIPPKFLKSALKF | seqid_2083 |
| variant_2746 | RWKKFLKIPPKFLKSALKF | seqid_2084 |
| variant_2747 | FWKKFLKIPPKFLKSALKF | seqid_2085 |
| variant_2748 | KKKLLLKIPPKFLKSALKF | seqid_2086 |
| variant_2749 | RKKLLLKIPPKFLKSALKF | seqid_2087 |
| variant_2750 | FKKLLLKIPPKFLKSALKF | seqid_2088 |
| variant_2751 | KWKLLLKIPPKFLKSALKF | seqid_2089 |
| variant_2752 | RWKLLLKIPPKFLKSALKF | seqid_2090 |
| variant_2753 | FWKLLLKIPPKFLKSALKF | seqid_2091 |
| variant_2754 | KKKKLLKIPPKFLKSALKF | seqid_2092 |
| variant_2755 | RKKKLLKIPPKFLKSALKF | seqid_2093 |
| variant_2756 | FKKKLLKIPPKFLKSALKF | seqid_2094 |
| variant_2757 | KWKKLLKIPPKFLKSALKF | seqid_2095 |
| variant_2758 | RWKKLLKIPPKFLKSALKF | seqid_2096 |
| variant_2759 | FWKKLLKIPPKFLKSALKF | seqid_2097 |
| variant_2760 | KKKLFKKIPPKFLKSALKF | seqid_2098 |
| variant_2761 | RKKLFKKIPPKFLKSALKF | seqid_2099 |
| variant_2762 | FKKLFKKIPPKFLKSALKF | seqid_2100 |
| variant_2763 | KWKLFKKIPPKFLKSALKF | seqid_2101 |
| variant_2764 | RWKLFKKIPPKFLKSALKF | seqid_2102 |
| variant_2765 | FWKLFKKIPPKFLKSALKF | seqid_2103 |
| variant_2766 | KKKKFKKIPPKFLKSALKF | seqid_2104 |
| variant_2767 | RKKKFKKIPPKFLKSALKF | seqid_2105 |
| variant_2768 | FKKKFKKIPPKFLKSALKF | seqid_2106 |
| variant_2769 | KWKKFKKIPPKFLKSALKF | seqid_2107 |
| variant_2770 | RWKKFKKIPPKFLKSALKF | seqid_2108 |
| variant_2771 | FWKKFKKIPPKFLKSALKF | seqid_2109 |
| variant_2772 | KKKLLKKIPPKFLKSALKF | seqid_2110 |
| variant_2773 | RKKLLKKIPPKFLKSALKF | seqid_2111 |
| variant_2774 | FKKLLKKIPPKFLKSALKF | seqid_2112 |
| variant_2775 | KWKLLKKIPPKFLKSALKF | seqid_2113 |
| variant_2776 | RWKLLKKIPPKFLKSALKF | seqid_2114 |
| variant_2777 | FWKLLKKIPPKFLKSALKF | seqid_2115 |
| variant_2778 | KKKKLKKIPPKFLKSALKF | seqid_2116 |
| variant_2779 | RKKKLKKIPPKFLKSALKF | seqid_2117 |
| variant_2780 | FKKKLKKIPPKFLKSALKF | seqid_2118 |
| variant_2781 | KWKKLKKIPPKFLKSALKF | seqid_2119 |
| variant_2782 | RWKKLKKIPPKFLKSALKF | seqid_2120 |
| variant_2783 | FWKKLKKIPPKFLKSALKF | seqid_2121 |
| variant_2832 | KKKLFLKIPKFLKSALKF | seqid_2122 |
| variant_2833 | RKKLFLKIPKFLKSALKF | seqid_2123 |
| variant_2834 | FKKLFLKIPKFLKSALKF | seqid_2124 |
| variant_2835 | KWKLFLKIPKFLKSALKF | seqid_2125 |
| variant_2836 | RWKLFLKIPKFLKSALKF | seqid_2126 |
| variant_2837 | FWKLFLKIPKFLKSALKF | seqid_2127 |
| variant_2838 | KKKKFLKIPKFLKSALKF | seqid_2128 |
| variant_2839 | RKKKFLKIPKFLKSALKF | seqid_2129 |
| variant_2840 | FKKKFLKIPKFLKSALKF | seqid_2130 |
| variant_2841 | KWKKFLKIPKFLKSALKF | seqid_2131 |
| variant_2842 | RWKKFLKIPKFLKSALKF | seqid_2132 |
| variant_2843 | FWKKFLKIPKFLKSALKF | seqid_2133 |
| variant_2844 | KKKLLLKIPKFLKSALKF | seqid_2134 |
| variant_2845 | RKKLLLKIPKFLKSALKF | seqid_2135 |
| variant_2846 | FKKLLLKIPKFLKSALKF | seqid_2136 |
| variant_2847 | KWKLLLKIPKFLKSALKF | seqid_2137 |
| variant_2848 | RWKLLLKIPKFLKSALKF | seqid_2138 |
| variant_2849 | FWKLLLKIPKFLKSALKF | seqid_2139 |
| variant_2850 | KKKKLLKIPKFLKSALKF | seqid_2140 |
| variant_2851 | RKKKLLKIPKFLKSALKF | seqid_2141 |
| variant_2852 | FKKKLLKIPKFLKSALKF | seqid_2142 |
| variant_2853 | KWKKLLKIPKFLKSALKF | seqid_2143 |
| variant_2854 | RWKKLLKIPKFLKSALKF | seqid_2144 |
| variant_2855 | FWKKLLKIPKFLKSALKF | seqid_2145 |
| variant_2856 | KKKLFKKIPKFLKSALKF | seqid_2146 |
| variant_2857 | RKKLFKKIPKFLKSALKF | seqid_2147 |
| variant_2858 | FKKLFKKIPKFLKSALKF | seqid_2148 |
| variant_2859 | KWKLFKKIPKFLKSALKF | seqid_2149 |
| variant_2860 | RWKLFKKIPKFLKSALKF | seqid_2150 |
| variant_2861 | FWKLFKKIPKFLKSALKF | seqid_2151 |
| variant_2862 | KKKKFKKIPKFLKSALKF | seqid_2152 |
| variant_2863 | RKKKFKKIPKFLKSALKF | seqid_2153 |
| variant_2864 | FKKKFKKIPKFLKSALKF | seqid_2154 |
| variant_2865 | KWKKFKKIPKFLKSALKF | seqid_2155 |
| variant_2866 | RWKKFKKIPKFLKSALKF | seqid_2156 |
| variant_2867 | FWKKFKKIPKFLKSALKF | seqid_2157 |
| variant_2868 | KKKLLKKIPKFLKSALKF | seqid_2158 |
| variant_2869 | RKKLLKKIPKFLKSALKF | seqid_2159 |
| variant_2870 | FKKLLKKIPKFLKSALKF | seqid_2160 |
| variant_2871 | KWKLLKKIPKFLKSALKF | seqid_2161 |
| variant_2872 | RWKLLKKIPKFLKSALKF | seqid_2162 |
| variant_2873 | FWKLLKKIPKFLKSALKF | seqid_2163 |
| variant_2874 | KKKKLKKIPKFLKSALKF | seqid_2164 |
| variant_2875 | RKKKLKKIPKFLKSALKF | seqid_2165 |
| variant_2876 | FKKKLKKIPKFLKSALKF | seqid_2166 |
| variant_2877 | KWKKLKKIPKFLKSALKF | seqid_2167 |
| variant_2878 | RWKKLKKIPKFLKSALKF | seqid_2168 |
| variant_2879 | FWKKLKKIPKFLKSALKF | seqid_2169 |
| variant_2880 | KKKLFLKIPPPKFKKSALKF | seqid_2170 |
| variant_2881 | RKKLFLKIPPPKFKKSALKF | seqid_2171 |
| variant_2882 | FKKLFLKIPPPKFKKSALKF | seqid_2172 |
| variant_2883 | KWKLFLKIPPPKFKKSALKF | seqid_2173 |
| variant_2884 | RWKLFLKIPPPKFKKSALKF | seqid_2174 |
| variant_2885 | FWKLFLKIPPPKFKKSALKF | seqid_2175 |
| variant_2886 | KKKKFLKIPPPKFKKSALKF | seqid_2176 |
| variant_2887 | RKKKFLKIPPPKFKKSALKF | seqid_2177 |
| variant_2888 | FKKKFLKIPPPKFKKSALKF | seqid_2178 |
| variant_2889 | KWKKFLKIPPPKFKKSALKF | seqid_2179 |
| variant_2890 | RWKKFLKIPPPKFKKSALKF | seqid_2180 |
| variant_2891 | FWKKFLKIPPPKFKKSALKF | seqid_2181 |
| variant_2892 | KKKLLLKIPPPKFKKSALKF | seqid_2182 |
| variant_2893 | RKKLLLKIPPPKFKKSALKF | seqid_2183 |
| variant_2894 | FKKLLLKIPPPKFKKSALKF | seqid_2184 |
| variant_2895 | KWKLLLKIPPPKFKKSALKF | seqid_2185 |
| variant_2896 | RWKLLLKIPPPKFKKSALKF | seqid_2186 |
| variant_2897 | FWKLLLKIPPPKFKKSALKF | seqid_2187 |
| variant_2898 | KKKKLLKIPPPKFKKSALKF | seqid_2188 |
| variant_2899 | RKKKLLKIPPPKFKKSALKF | seqid_2189 |
| variant_2900 | FKKKLLKIPPPKFKKSALKF | seqid_2190 |
| variant_2901 | KWKKLLKIPPPKFKKSALKF | seqid_2191 |
| variant_2902 | RWKKLLKIPPPKFKKSALKF | seqid_2192 |
| variant_2903 | FWKKLLKIPPPKFKKSALKF | seqid_2193 |
| variant_2904 | KKKLFKKIPPPKFKKSALKF | seqid_2194 |
| variant_2905 | RKKLFKKIPPPKFKKSALKF | seqid_2195 |
| variant_2906 | FKKLFKKIPPPKFKKSALKF | seqid_2196 |
| variant_2907 | KWKLFKKIPPPKFKKSALKF | seqid_2197 |
| variant_2908 | RWKLFKKIPPPKFKKSALKF | seqid_2198 |
| variant_2909 | FWKLFKKIPPPKFKKSALKF | seqid_2199 |
| variant_2910 | KKKKFKKIPPPKFKKSALKF | seqid_2200 |
| variant_2911 | RKKKFKKIPPPKFKKSALKF | seqid_2201 |
| variant_2912 | FKKKFKKIPPPKFKKSALKF | seqid_2202 |
| variant_2913 | KWKKFKKIPPPKFKKSALKF | seqid_2203 |
| variant_2914 | RWKKFKKIPPPKFKKSALKF | seqid_2204 |
| variant_2915 | FWKKFKKIPPPKFKKSALKF | seqid_2205 |
| variant_2916 | KKKLLKKIPPPKFKKSALKF | seqid_2206 |
| variant_2917 | RKKLLKKIPPPKFKKSALKF | seqid_2207 |
| variant_2918 | FKKLLKKIPPPKFKKSALKF | seqid_2208 |
| variant_2919 | KWKLLKKIPPPKFKKSALKF | seqid_2209 |
| variant_2920 | RWKLLKKIPPPKFKKSALKF | seqid_2210 |
| variant_2921 | FWKLLKKIPPPKFKKSALKF | seqid_2211 |
| variant_2922 | KKKKLKKIPPPKFKKSALKF | seqid_2212 |
| variant_2923 | RKKKLKKIPPPKFKKSALKF | seqid_2213 |
| variant_2924 | FKKKLKKIPPPKFKKSALKF | seqid_2214 |
| variant_2925 | KWKKLKKIPPPKFKKSALKF | seqid_2215 |
| variant_2926 | RWKKLKKIPPPKFKKSALKF | seqid_2216 |
| variant_2927 | FWKKLKKIPPPKFKKSALKF | seqid_2217 |
| variant_2928 | KKKLFLKIPPKFKKSALKF | seqid_2218 |
| variant_2929 | RKKLFLKIPPKFKKSALKF | seqid_2219 |
| variant_2930 | FKKLFLKIPPKFKKSALKF | seqid_2220 |
| variant_2931 | KWKLFLKIPPKFKKSALKF | seqid_2221 |
| variant_2932 | RWKLFLKIPPKFKKSALKF | seqid_2222 |
| variant_2933 | FWKLFLKIPPKFKKSALKF | seqid_2223 |
| variant_2934 | KKKKFLKIPPKFKKSALKF | seqid_2224 |
| variant_2935 | RKKKFLKIPPKFKKSALKF | seqid_2225 |
| variant_2936 | FKKKFLKIPPKFKKSALKF | seqid_2226 |
| variant_2937 | KWKKFLKIPPKFKKSALKF | seqid_2227 |
| variant_2938 | RWKKFLKIPPKFKKSALKF | seqid_2228 |
| variant_2939 | FWKKFLKIPPKFKKSALKF | seqid_2229 |
| variant_2940 | KKKLLLKIPPKFKKSALKF | seqid_2230 |
| variant_2941 | RKKLLLKIPPKFKKSALKF | seqid_2231 |
| variant_2942 | FKKLLLKIPPKFKKSALKF | seqid_2232 |
| variant_2943 | KWKLLLKIPPKFKKSALKF | seqid_2233 |
| variant_2944 | RWKLLLKIPPKFKKSALKF | seqid_2234 |
| variant_2945 | FWKLLLKIPPKFKKSALKF | seqid_2235 |
| variant_2946 | KKKKLLKIPPKFKKSALKF | seqid_2236 |
| variant_2947 | RKKKLLKIPPKFKKSALKF | seqid_2237 |
| variant_2948 | FKKKLLKIPPKFKKSALKF | seqid_2238 |
| variant_2949 | KWKKLLKIPPKFKKSALKF | seqid_2239 |
| variant_2950 | RWKKLLKIPPKFKKSALKF | seqid_2240 |
| variant_2951 | FWKKLLKIPPKFKKSALKF | seqid_2241 |
| variant_2952 | KKKLFKKIPPKFKKSALKF | seqid_2242 |
| variant_2953 | RKKLFKKIPPKFKKSALKF | seqid_2243 |
| variant_2954 | FKKLFKKIPPKFKKSALKF | seqid_2244 |
| variant_2955 | KWKLFKKIPPKFKKSALKF | seqid_2245 |
| variant_2956 | RWKLFKKIPPKFKKSALKF | seqid_2246 |
| variant_2957 | FWKLFKKIPPKFKKSALKF | seqid_2247 |
| variant_2958 | KKKKFKKIPPKFKKSALKF | seqid_2248 |
| variant_2959 | RKKKFKKIPPKFKKSALKF | seqid_2249 |
| variant_2960 | FKKKFKKIPPKFKKSALKF | seqid_2250 |
| variant_2961 | KWKKFKKIPPKFKKSALKF | seqid_2251 |
| variant_2962 | RWKKFKKIPPKFKKSALKF | seqid_2252 |
| variant_2963 | FWKKFKKIPPKFKKSALKF | seqid_2253 |
| variant_2964 | KKKLLKKIPPKFKKSALKF | seqid_2254 |
| variant_2965 | RKKLLKKIPPKFKKSALKF | seqid_2255 |
| variant_2966 | FKKLLKKIPPKFKKSALKF | seqid_2256 |
| variant_2967 | KWKLLKKIPPKFKKSALKF | seqid_2257 |
| variant_2968 | RWKLLKKIPPKFKKSALKF | seqid_2258 |
| variant_2969 | FWKLLKKIPPKFKKSALKF | seqid_2259 |
| variant_2970 | KKKKLKKIPPKFKKSALKF | seqid_2260 |
| variant_2971 | RKKKLKKIPPKFKKSALKF | seqid_2261 |
| variant_2972 | FKKKLKKIPPKFKKSALKF | seqid_2262 |
| variant_2973 | KWKKLKKIPPKFKKSALKF | seqid_2263 |
| variant_2974 | RWKKLKKIPPKFKKSALKF | seqid_2264 |
| variant_2975 | FWKKLKKIPPKFKKSALKF | seqid_2265 |
| variant_3024 | KKKLFLKIPKFKKSALKF | seqid_2266 |
| variant_3025 | RKKLFLKIPKFKKSALKF | seqid_2267 |
| variant_3026 | FKKLFLKIPKFKKSALKF | seqid_2268 |
| variant_3027 | KWKLFLKIPKFKKSALKF | seqid_2269 |
| variant_3028 | RWKLFLKIPKFKKSALKF | seqid_2270 |
| variant_3029 | FWKLFLKIPKFKKSALKF | seqid_2271 |
| variant_3030 | KKKKFLKIPKFKKSALKF | seqid_2272 |
| variant_3031 | RKKKFLKIPKFKKSALKF | seqid_2273 |
| variant_3032 | FKKKFLKIPKFKKSALKF | seqid_2274 |
| variant_3033 | KWKKFLKIPKFKKSALKF | seqid_2275 |
| variant_3034 | RWKKFLKIPKFKKSALKF | seqid_2276 |
| variant_3035 | FWKKFLKIPKFKKSALKF | seqid_2277 |
| variant_3036 | KKKLLLKIPKFKKSALKF | seqid_2278 |
| variant_3037 | RKKLLLKIPKFKKSALKF | seqid_2279 |
| variant_3038 | FKKLLLKIPKFKKSALKF | seqid_2280 |
| variant_3039 | KWKLLLKIPKFKKSALKF | seqid_2281 |
| variant_3040 | RWKLLLKIPKFKKSALKF | seqid_2282 |
| variant_3041 | FWKLLLKIPKFKKSALKF | seqid_2283 |
| variant_3042 | KKKKLLKIPKFKKSALKF | seqid_2284 |
| variant_3043 | RKKKLLKIPKFKKSALKF | seqid_2285 |
| variant_3044 | FKKKLLKIPKFKKSALKF | seqid_2286 |
| variant_3045 | KWKKLLKIPKFKKSALKF | seqid_2287 |
| variant_3046 | RWKKLLKIPKFKKSALKF | seqid_2288 |
| variant_3047 | FWKKLLKIPKFKKSALKF | seqid_2289 |
| variant_3048 | KKKLFKKIPKFKKSALKF | seqid_2290 |
| variant_3049 | RKKLFKKIPKFKKSALKF | seqid_2291 |
| variant_3050 | FKKLFKKIPKFKKSALKF | seqid_2292 |
| variant_3051 | KWKLFKKIPKFKKSALKF | seqid_2293 |
| variant_3052 | RWKLFKKIPKFKKSALKF | seqid_2294 |
| variant_3053 | FWKLFKKIPKFKKSALKF | seqid_2295 |
| variant_3054 | KKKKFKKIPKFKKSALKF | seqid_2296 |
| variant_3055 | RKKKFKKIPKFKKSALKF | seqid_2297 |
| variant_3056 | FKKKFKKIPKFKKSALKF | seqid_2298 |
| variant_3057 | KWKKFKKIPKFKKSALKF | seqid_2299 |
| variant_3058 | RWKKFKKIPKFKKSALKF | seqid_2300 |
| variant_3059 | FWKKFKKIPKFKKSALKF | seqid_2301 |
| variant_3060 | KKKLLKKIPKFKKSALKF | seqid_2302 |
| variant_3061 | RKKLLKKIPKFKKSALKF | seqid_2303 |
| variant_3062 | FKKLLKKIPKFKKSALKF | seqid_2304 |
| variant_3063 | KWKLLKKIPKFKKSALKF | seqid_2305 |
| variant_3064 | RWKLLKKIPKFKKSALKF | seqid_2306 |
| variant_3065 | FWKLLKKIPKFKKSALKF | seqid_2307 |
| variant_3066 | KKKKLKKIPKFKKSALKF | seqid_2308 |
| variant_3067 | RKKKLKKIPKFKKSALKF | seqid_2309 |
| variant_3068 | FKKKLKKIPKFKKSALKF | seqid_2310 |
| variant_3069 | KWKKLKKIPKFKKSALKF | seqid_2311 |
| variant_3070 | RWKKLKKIPKFKKSALKF | seqid_2312 |
| variant_3071 | FWKKLKKIPKFKKSALKF | seqid_2313 |
| variant_3072 | KKKLFLKIPPPKFLHAAKKF | seqid_2314 |
| variant_3073 | RKKLFLKIPPPKFLHAAKKF | seqid_2315 |
| variant_3074 | FKKLFLKIPPPKFLHAAKKF | seqid_2316 |
| variant_3075 | KWKLFLKIPPPKFLHAAKKF | seqid_2317 |
| variant_3076 | RWKLFLKIPPPKFLHAAKKF | seqid_2318 |
| variant_3077 | FWKLFLKIPPPKFLHAAKKF | seqid_2319 |
| variant_3078 | KKKKFLKIPPPKFLHAAKKF | seqid_2320 |
| variant_3079 | RKKKFLKIPPPKFLHAAKKF | seqid_2321 |
| variant_3080 | FKKKFLKIPPPKFLHAAKKF | seqid_2322 |
| variant_3081 | KWKKFLKIPPPKFLHAAKKF | seqid_2323 |
| variant_3082 | RWKKFLKIPPPKFLHAAKKF | seqid_2324 |
| variant_3083 | FWKKFLKIPPPKFLHAAKKF | seqid_2325 |
| variant_3084 | KKKLLLKIPPPKFLHAAKKF | seqid_2326 |
| variant_3085 | RKKLLLKIPPPKFLHAAKKF | seqid_2327 |
| variant_3086 | FKKLLLKIPPPKFLHAAKKF | seqid_2328 |
| variant_3087 | KWKLLLKIPPPKFLHAAKKF | seqid_2329 |
| variant_3088 | RWKLLLKIPPPKFLHAAKKF | seqid_2330 |
| variant_3089 | FWKLLLKIPPPKFLHAAKKF | seqid_2331 |
| variant_3090 | KKKKLLKIPPPKFLHAAKKF | seqid_2332 |
| variant_3091 | RKKKLLKIPPPKFLHAAKKF | seqid_2333 |
| variant_3092 | FKKKLLKIPPPKFLHAAKKF | seqid_2334 |
| variant_3093 | KWKKLLKIPPPKFLHAAKKF | seqid_2335 |
| variant_3094 | RWKKLLKIPPPKFLHAAKKF | seqid_2336 |
| variant_3095 | FWKKLLKIPPPKFLHAAKKF | seqid_2337 |
| variant_3096 | KKKLFKKIPPPKFLHAAKKF | seqid_2338 |
| variant_3097 | RKKLFKKIPPPKFLHAAKKF | seqid_2339 |
| variant_3098 | FKKLFKKIPPPKFLHAAKKF | seqid_2340 |
| variant_3099 | KWKLFKKIPPPKFLHAAKKF | seqid_2341 |
| variant_3100 | RWKLFKKIPPPKFLHAAKKF | seqid_2342 |
| variant_3101 | FWKLFKKIPPPKFLHAAKKF | seqid_2343 |
| variant_3102 | KKKKFKKIPPPKFLHAAKKF | seqid_2344 |
| variant_3103 | RKKKFKKIPPPKFLHAAKKF | seqid_2345 |
| variant_3104 | FKKKFKKIPPPKFLHAAKKF | seqid_2346 |
| variant_3105 | KWKKFKKIPPPKFLHAAKKF | seqid_2347 |
| variant_3106 | RWKKFKKIPPPKFLHAAKKF | seqid_2348 |
| variant_3107 | FWKKFKKIPPPKFLHAAKKF | seqid_2349 |
| variant_3108 | KKKLLKKIPPPKFLHAAKKF | seqid_2350 |
| variant_3109 | RKKLLKKIPPPKFLHAAKKF | seqid_2351 |
| variant_3110 | FKKLLKKIPPPKFLHAAKKF | seqid_2352 |
| variant_3111 | KWKLLKKIPPPKFLHAAKKF | seqid_2353 |
| variant_3112 | RWKLLKKIPPPKFLHAAKKF | seqid_2354 |
| variant_3113 | FWKLLKKIPPPKFLHAAKKF | seqid_2355 |
| variant_3114 | KKKKLKKIPPPKFLHAAKKF | seqid_2356 |
| variant_3115 | RKKKLKKIPPPKFLHAAKKF | seqid_2357 |
| variant_3116 | FKKKLKKIPPPKFLHAAKKF | seqid_2358 |
| variant_3117 | KWKKLKKIPPPKFLHAAKKF | seqid_2359 |
| variant_3118 | RWKKLKKIPPPKFLHAAKKF | seqid_2360 |
| variant_3119 | FWKKLKKIPPPKFLHAAKKF | seqid_2361 |
| variant_3120 | KKKLFLKIPPKFLHAAKKF | seqid_2362 |
| variant_3121 | RKKLFLKIPPKFLHAAKKF | seqid_2363 |
| variant_3122 | FKKLFLKIPPKFLHAAKKF | seqid_2364 |
| variant_3123 | KWKLFLKIPPKFLHAAKKF | seqid_2365 |
| variant_3124 | RWKLFLKIPPKFLHAAKKF | seqid_2366 |
| variant_3125 | FWKLFLKIPPKFLHAAKKF | seqid_2367 |
| variant_3126 | KKKKFLKIPPKFLHAAKKF | seqid_2368 |
| variant_3127 | RKKKFLKIPPKFLHAAKKF | seqid_2369 |
| variant_3128 | FKKKFLKIPPKFLHAAKKF | seqid_2370 |
| variant_3129 | KWKKFLKIPPKFLHAAKKF | seqid_2371 |
| variant_3130 | RWKKFLKIPPKFLHAAKKF | seqid_2372 |
| variant_3131 | FWKKFLKIPPKFLHAAKKF | seqid_2373 |
| variant_3132 | KKKLLLKIPPKFLHAAKKF | seqid_2374 |
| variant_3133 | RKKLLLKIPPKFLHAAKKF | seqid_2375 |
| variant_3134 | FKKLLLKIPPKFLHAAKKF | seqid_2376 |
| variant_3135 | KWKLLLKIPPKFLHAAKKF | seqid_2377 |
| variant_3136 | RWKLLLKIPPKFLHAAKKF | seqid_2378 |
| variant_3137 | FWKLLLKIPPKFLHAAKKF | seqid_2379 |
| variant_3138 | KKKKLLKIPPKFLHAAKKF | seqid_2380 |
| variant_3139 | RKKKLLKIPPKFLHAAKKF | seqid_2381 |
| variant_3140 | FKKKLLKIPPKFLHAAKKF | seqid_2382 |
| variant_3141 | KWKKLLKIPPKFLHAAKKF | seqid_2383 |
| variant_3142 | RWKKLLKIPPKFLHAAKKF | seqid_2384 |
| variant_3143 | FWKKLLKIPPKFLHAAKKF | seqid_2385 |
| variant_3144 | KKKLFKKIPPKFLHAAKKF | seqid_2386 |
| variant_3145 | RKKLFKKIPPKFLHAAKKF | seqid_2387 |
| variant_3146 | FKKLFKKIPPKFLHAAKKF | seqid_2388 |
| variant_3147 | KWKLFKKIPPKFLHAAKKF | seqid_2389 |
| variant_3148 | RWKLFKKIPPKFLHAAKKF | seqid_2390 |
| variant_3149 | FWKLFKKIPPKFLHAAKKF | seqid_2391 |
| variant_3150 | KKKKFKKIPPKFLHAAKKF | seqid_2392 |
| variant_3151 | RKKKFKKIPPKFLHAAKKF | seqid_2393 |
| variant_3152 | FKKKFKKIPPKFLHAAKKF | seqid_2394 |
| variant_3153 | KWKKFKKIPPKFLHAAKKF | seqid_2395 |
| variant_3154 | RWKKFKKIPPKFLHAAKKF | seqid_2396 |
| variant_3155 | FWKKFKKIPPKFLHAAKKF | seqid_2397 |
| variant_3156 | KKKLLKKIPPKFLHAAKKF | seqid_2398 |
| variant_3157 | RKKLLKKIPPKFLHAAKKF | seqid_2399 |
| variant_3158 | FKKLLKKIPPKFLHAAKKF | seqid_2400 |
| variant_3159 | KWKLLKKIPPKFLHAAKKF | seqid_2401 |
| variant_3160 | RWKLLKKIPPKFLHAAKKF | seqid_2402 |
| variant_3161 | FWKLLKKIPPKFLHAAKKF | seqid_2403 |
| variant_3162 | KKKKLKKIPPKFLHAAKKF | seqid_2404 |
| variant_3163 | RKKKLKKIPPKFLHAAKKF | seqid_2405 |
| variant_3164 | FKKKLKKIPPKFLHAAKKF | seqid_2406 |
| variant_3165 | KWKKLKKIPPKFLHAAKKF | seqid_2407 |
| variant_3166 | RWKKLKKIPPKFLHAAKKF | seqid_2408 |
| variant_3167 | FWKKLKKIPPKFLHAAKKF | seqid_2409 |
| variant_3216 | KKKLFLKIPKFLHAAKKF | seqid_2410 |
| variant_3217 | RKKLFLKIPKFLHAAKKF | seqid_2411 |
| variant_3218 | FKKLFLKIPKFLHAAKKF | seqid_2412 |
| variant_3219 | KWKLFLKIPKFLHAAKKF | seqid_2413 |
| variant_3220 | RWKLFLKIPKFLHAAKKF | seqid_2414 |
| variant_3221 | FWKLFLKIPKFLHAAKKF | seqid_2415 |
| variant_3222 | KKKKFLKIPKFLHAAKKF | seqid_2416 |
| variant_3223 | RKKKFLKIPKFLHAAKKF | seqid_2417 |
| variant_3224 | FKKKFLKIPKFLHAAKKF | seqid_2418 |
| variant_3225 | KWKKFLKIPKFLHAAKKF | seqid_8 |
| variant_3226 | RWKKFLKIPKFLHAAKKF | seqid_2419 |
| variant_3227 | FWKKFLKIPKFLHAAKKF | seqid_2420 |
| variant_3228 | KKKLLLKIPKFLHAAKKF | seqid_2421 |
| variant_3229 | RKKLLLKIPKFLHAAKKF | seqid_2422 |
| variant_3230 | FKKLLLKIPKFLHAAKKF | seqid_2423 |
| variant_3231 | KWKLLLKIPKFLHAAKKF | seqid_2424 |
| variant_3232 | RWKLLLKIPKFLHAAKKF | seqid_2425 |
| variant_3233 | FWKLLLKIPKFLHAAKKF | seqid_2426 |
| variant_3234 | KKKKLLKIPKFLHAAKKF | seqid_2427 |
| variant_3235 | RKKKLLKIPKFLHAAKKF | seqid_2428 |
| variant_3236 | FKKKLLKIPKFLHAAKKF | seqid_2429 |
| variant_3237 | KWKKLLKIPKFLHAAKKF | seqid_9 |
| variant_3238 | RWKKLLKIPKFLHAAKKF | seqid_2430 |
| variant_3239 | FWKKLLKIPKFLHAAKKF | seqid_2431 |
| variant_3240 | KKKLFKKIPKFLHAAKKF | seqid_2432 |
| variant_3241 | RKKLFKKIPKFLHAAKKF | seqid_2433 |
| variant_3242 | FKKLFKKIPKFLHAAKKF | seqid_5 |
| variant_3243 | KWKLFKKIPKFLHAAKKF | seqid_7 |
| variant_3244 | RWKLFKKIPKFLHAAKKF | seqid_2434 |
| variant_3245 | FWKLFKKIPKFLHAAKKF | seqid_2435 |
| variant_3246 | KKKKFKKIPKFLHAAKKF | seqid_2436 |
| variant_3247 | RKKKFKKIPKFLHAAKKF | seqid_2437 |
| variant_3248 | FKKKFKKIPKFLHAAKKF | seqid_2438 |
| variant_3249 | KWKKFKKIPKFLHAAKKF | seqid_2439 |
| variant_3250 | RWKKFKKIPKFLHAAKKF | seqid_2440 |
| variant_3251 | FWKKFKKIPKFLHAAKKF | seqid_2441 |
| variant_3252 | KKKLLKKIPKFLHAAKKF | seqid_2442 |
| variant_3253 | RKKLLKKIPKFLHAAKKF | seqid_2443 |
| variant_3254 | FKKLLKKIPKFLHAAKKF | seqid_2444 |
| variant_3255 | KWKLLKKIPKFLHAAKKF | seqid_2445 |
| variant_3256 | RWKLLKKIPKFLHAAKKF | seqid_2446 |
| variant_3257 | FWKLLKKIPKFLHAAKKF | seqid_2447 |
| variant_3258 | KKKKLKKIPKFLHAAKKF | seqid_2448 |
| variant_3259 | RKKKLKKIPKFLHAAKKF | seqid_2449 |
| variant_3260 | FKKKLKKIPKFLHAAKKF | seqid_2450 |
| variant_3261 | KWKKLKKIPKFLHAAKKF | seqid_2451 |
| variant_3262 | RWKKLKKIPKFLHAAKKF | seqid_2452 |
| variant_3263 | FWKKLKKIPKFLHAAKKF | seqid_2453 |
| variant_3264 | KKKLFLKIPPPKFKHAAKKF | seqid_2454 |
| variant_3265 | RKKLFLKIPPPKFKHAAKKF | seqid_2455 |
| variant_3266 | FKKLFLKIPPPKFKHAAKKF | seqid_2456 |
| variant_3267 | KWKLFLKIPPPKFKHAAKKF | seqid_2457 |
| variant_3268 | RWKLFLKIPPPKFKHAAKKF | seqid_2458 |
| variant_3269 | FWKLFLKIPPPKFKHAAKKF | seqid_2459 |
| variant_3270 | KKKKFLKIPPPKFKHAAKKF | seqid_2460 |
| variant_3271 | RKKKFLKIPPPKFKHAAKKF | seqid_2461 |
| variant_3272 | FKKKFLKIPPPKFKHAAKKF | seqid_2462 |
| variant_3273 | KWKKFLKIPPPKFKHAAKKF | seqid_2463 |
| variant_3274 | RWKKFLKIPPPKFKHAAKKF | seqid_2464 |
| variant_3275 | FWKKFLKIPPPKFKHAAKKF | seqid_2465 |
| variant_3276 | KKKLLLKIPPPKFKHAAKKF | seqid_2466 |
| variant_3277 | RKKLLLKIPPPKFKHAAKKF | seqid_2467 |
| variant_3278 | FKKLLLKIPPPKFKHAAKKF | seqid_2468 |
| variant_3279 | KWKLLLKIPPPKFKHAAKKF | seqid_2469 |
| variant_3280 | RWKLLLKIPPPKFKHAAKKF | seqid_2470 |
| variant_3281 | FWKLLLKIPPPKFKHAAKKF | seqid_2471 |
| variant_3282 | KKKKLLKIPPPKFKHAAKKF | seqid_2472 |
| variant_3283 | RKKKLLKIPPPKFKHAAKKF | seqid_2473 |
| variant_3284 | FKKKLLKIPPPKFKHAAKKF | seqid_2474 |
| variant_3285 | KWKKLLKIPPPKFKHAAKKF | seqid_2475 |
| variant_3286 | RWKKLLKIPPPKFKHAAKKF | seqid_2476 |
| variant_3287 | FWKKLLKIPPPKFKHAAKKF | seqid_2477 |
| variant_3288 | KKKLFKKIPPPKFKHAAKKF | seqid_2478 |
| variant_3289 | RKKLFKKIPPPKFKHAAKKF | seqid_2479 |
| variant_3290 | FKKLFKKIPPPKFKHAAKKF | seqid_2480 |
| variant_3291 | KWKLFKKIPPPKFKHAAKKF | seqid_2481 |
| variant_3292 | RWKLFKKIPPPKFKHAAKKF | seqid_2482 |
| variant_3293 | FWKLFKKIPPPKFKHAAKKF | seqid_2483 |
| variant_3294 | KKKKFKKIPPPKFKHAAKKF | seqid_2484 |
| variant_3295 | RKKKFKKIPPPKFKHAAKKF | seqid_2485 |
| variant_3296 | FKKKFKKIPPPKFKHAAKKF | seqid_2486 |
| variant_3297 | KWKKFKKIPPPKFKHAAKKF | seqid_2487 |
| variant_3298 | RWKKFKKIPPPKFKHAAKKF | seqid_2488 |
| variant_3299 | FWKKFKKIPPPKFKHAAKKF | seqid_2489 |
| variant_3300 | KKKLLKKIPPPKFKHAAKKF | seqid_2490 |
| variant_3301 | RKKLLKKIPPPKFKHAAKKF | seqid_2491 |
| variant_3302 | FKKLLKKIPPPKFKHAAKKF | seqid_2492 |
| variant_3303 | KWKLLKKIPPPKFKHAAKKF | seqid_2493 |
| variant_3304 | RWKLLKKIPPPKFKHAAKKF | seqid_2494 |
| variant_3305 | FWKLLKKIPPPKFKHAAKKF | seqid_2495 |
| variant_3306 | KKKKLKKIPPPKFKHAAKKF | seqid_2496 |
| variant_3307 | RKKKLKKIPPPKFKHAAKKF | seqid_2497 |
| variant_3308 | FKKKLKKIPPPKFKHAAKKF | seqid_2498 |
| variant_3309 | KWKKLKKIPPPKFKHAAKKF | seqid_2499 |
| variant_3310 | RWKKLKKIPPPKFKHAAKKF | seqid_2500 |
| variant_3311 | FWKKLKKIPPPKFKHAAKKF | seqid_2501 |
| variant_3312 | KKKLFLKIPPKFKHAAKKF | seqid_2502 |
| variant_3313 | RKKLFLKIPPKFKHAAKKF | seqid_2503 |
| variant_3314 | FKKLFLKIPPKFKHAAKKF | seqid_2504 |
| variant_3315 | KWKLFLKIPPKFKHAAKKF | seqid_2505 |
| variant_3316 | RWKLFLKIPPKFKHAAKKF | seqid_2506 |
| variant_3317 | FWKLFLKIPPKFKHAAKKF | seqid_2507 |
| variant_3318 | KKKKFLKIPPKFKHAAKKF | seqid_2508 |
| variant_3319 | RKKKFLKIPPKFKHAAKKF | seqid_2509 |
| variant_3320 | FKKKFLKIPPKFKHAAKKF | seqid_2510 |
| variant_3321 | KWKKFLKIPPKFKHAAKKF | seqid_2511 |
| variant_3322 | RWKKFLKIPPKFKHAAKKF | seqid_2512 |
| variant_3323 | FWKKFLKIPPKFKHAAKKF | seqid_2513 |
| variant_3324 | KKKLLLKIPPKFKHAAKKF | seqid_2514 |
| variant_3325 | RKKLLLKIPPKFKHAAKKF | seqid_2515 |
| variant_3326 | FKKLLLKIPPKFKHAAKKF | seqid_2516 |
| variant_3327 | KWKLLLKIPPKFKHAAKKF | seqid_2517 |
| variant_3328 | RWKLLLKIPPKFKHAAKKF | seqid_2518 |
| variant_3329 | FWKLLLKIPPKFKHAAKKF | seqid_2519 |
| variant_3330 | KKKKLLKIPPKFKHAAKKF | seqid_2520 |
| variant_3331 | RKKKLLKIPPKFKHAAKKF | seqid_2521 |
| variant_3332 | FKKKLLKIPPKFKHAAKKF | seqid_2522 |
| variant_3333 | KWKKLLKIPPKFKHAAKKF | seqid_2523 |
| variant_3334 | RWKKLLKIPPKFKHAAKKF | seqid_2524 |
| variant_3335 | FWKKLLKIPPKFKHAAKKF | seqid_2525 |
| variant_3336 | KKKLFKKIPPKFKHAAKKF | seqid_2526 |
| variant_3337 | RKKLFKKIPPKFKHAAKKF | seqid_2527 |
| variant_3338 | FKKLFKKIPPKFKHAAKKF | seqid_2528 |
| variant_3339 | KWKLFKKIPPKFKHAAKKF | seqid_2529 |
| variant_3340 | RWKLFKKIPPKFKHAAKKF | seqid_2530 |
| variant_3341 | FWKLFKKIPPKFKHAAKKF | seqid_2531 |
| variant_3342 | KKKKFKKIPPKFKHAAKKF | seqid_2532 |
| variant_3343 | RKKKFKKIPPKFKHAAKKF | seqid_2533 |
| variant_3344 | FKKKFKKIPPKFKHAAKKF | seqid_2534 |
| variant_3345 | KWKKFKKIPPKFKHAAKKF | seqid_2535 |
| variant_3346 | RWKKFKKIPPKFKHAAKKF | seqid_2536 |
| variant_3347 | FWKKFKKIPPKFKHAAKKF | seqid_2537 |
| variant_3348 | KKKLLKKIPPKFKHAAKKF | seqid_2538 |
| variant_3349 | RKKLLKKIPPKFKHAAKKF | seqid_2539 |
| variant_3350 | FKKLLKKIPPKFKHAAKKF | seqid_2540 |
| variant_3351 | KWKLLKKIPPKFKHAAKKF | seqid_2541 |
| variant_3352 | RWKLLKKIPPKFKHAAKKF | seqid_2542 |
| variant_3353 | FWKLLKKIPPKFKHAAKKF | seqid_2543 |
| variant_3354 | KKKKLKKIPPKFKHAAKKF | seqid_2544 |
| variant_3355 | RKKKLKKIPPKFKHAAKKF | seqid_2545 |
| variant_3356 | FKKKLKKIPPKFKHAAKKF | seqid_2546 |
| variant_3357 | KWKKLKKIPPKFKHAAKKF | seqid_2547 |
| variant_3358 | RWKKLKKIPPKFKHAAKKF | seqid_2548 |
| variant_3359 | FWKKLKKIPPKFKHAAKKF | seqid_2549 |
| variant_3408 | KKKLFLKIPKFKHAAKKF | seqid_2550 |
| variant_3409 | RKKLFLKIPKFKHAAKKF | seqid_2551 |
| variant_3410 | FKKLFLKIPKFKHAAKKF | seqid_2552 |
| variant_3411 | KWKLFLKIPKFKHAAKKF | seqid_2553 |
| variant_3412 | RWKLFLKIPKFKHAAKKF | seqid_2554 |
| variant_3413 | FWKLFLKIPKFKHAAKKF | seqid_2555 |
| variant_3414 | KKKKFLKIPKFKHAAKKF | seqid_2556 |
| variant_3415 | RKKKFLKIPKFKHAAKKF | seqid_2557 |
| variant_3416 | FKKKFLKIPKFKHAAKKF | seqid_2558 |
| variant_3417 | KWKKFLKIPKFKHAAKKF | seqid_2559 |
| variant_3418 | RWKKFLKIPKFKHAAKKF | seqid_2560 |
| variant_3419 | FWKKFLKIPKFKHAAKKF | seqid_2561 |
| variant_3420 | KKKLLLKIPKFKHAAKKF | seqid_2562 |
| variant_3421 | RKKLLLKIPKFKHAAKKF | seqid_2563 |
| variant_3422 | FKKLLLKIPKFKHAAKKF | seqid_2564 |
| variant_3423 | KWKLLLKIPKFKHAAKKF | seqid_2565 |
| variant_3424 | RWKLLLKIPKFKHAAKKF | seqid_2566 |
| variant_3425 | FWKLLLKIPKFKHAAKKF | seqid_2567 |
| variant_3426 | KKKKLLKIPKFKHAAKKF | seqid_2568 |
| variant_3427 | RKKKLLKIPKFKHAAKKF | seqid_2569 |
| variant_3428 | FKKKLLKIPKFKHAAKKF | seqid_2570 |
| variant_3429 | KWKKLLKIPKFKHAAKKF | seqid_2571 |
| variant_3430 | RWKKLLKIPKFKHAAKKF | seqid_2572 |
| variant_3431 | FWKKLLKIPKFKHAAKKF | seqid_2573 |
| variant_3432 | KKKLFKKIPKFKHAAKKF | seqid_2574 |
| variant_3433 | RKKLFKKIPKFKHAAKKF | seqid_2575 |
| variant_3434 | FKKLFKKIPKFKHAAKKF | seqid_2576 |
| variant_3435 | KWKLFKKIPKFKHAAKKF | seqid_2577 |
| variant_3436 | RWKLFKKIPKFKHAAKKF | seqid_2578 |
| variant_3437 | FWKLFKKIPKFKHAAKKF | seqid_2579 |
| variant_3438 | KKKKFKKIPKFKHAAKKF | seqid_2580 |
| variant_3439 | RKKKFKKIPKFKHAAKKF | seqid_2581 |
| variant_3440 | FKKKFKKIPKFKHAAKKF | seqid_2582 |
| variant_3441 | KWKKFKKIPKFKHAAKKF | seqid_2583 |
| variant_3442 | RWKKFKKIPKFKHAAKKF | seqid_2584 |
| variant_3443 | FWKKFKKIPKFKHAAKKF | seqid_2585 |
| variant_3444 | KKKLLKKIPKFKHAAKKF | seqid_2586 |
| variant_3445 | RKKLLKKIPKFKHAAKKF | seqid_2587 |
| variant_3446 | FKKLLKKIPKFKHAAKKF | seqid_2588 |
| variant_3447 | KWKLLKKIPKFKHAAKKF | seqid_2589 |
| variant_3448 | RWKLLKKIPKFKHAAKKF | seqid_2590 |
| variant_3449 | FWKLLKKIPKFKHAAKKF | seqid_2591 |
| variant_3450 | KKKKLKKIPKFKHAAKKF | seqid_2592 |
| variant_3451 | RKKKLKKIPKFKHAAKKF | seqid_2593 |
| variant_3452 | FKKKLKKIPKFKHAAKKF | seqid_2594 |
| variant_3453 | KWKKLKKIPKFKHAAKKF | seqid_2595 |
| variant_3454 | RWKKLKKIPKFKHAAKKF | seqid_2596 |
| variant_3455 | FWKKLKKIPKFKHAAKKF | seqid_2597 |
| variant_3456 | KKKLFLKIPPPKFLKAAKKF | seqid_2598 |
| variant_3457 | RKKLFLKIPPPKFLKAAKKF | seqid_2599 |
| variant_3458 | FKKLFLKIPPPKFLKAAKKF | seqid_2600 |
| variant_3459 | KWKLFLKIPPPKFLKAAKKF | seqid_2601 |
| variant_3460 | RWKLFLKIPPPKFLKAAKKF | seqid_2602 |
| variant_3461 | FWKLFLKIPPPKFLKAAKKF | seqid_2603 |
| variant_3462 | KKKKFLKIPPPKFLKAAKKF | seqid_2604 |
| variant_3463 | RKKKFLKIPPPKFLKAAKKF | seqid_2605 |
| variant_3464 | FKKKFLKIPPPKFLKAAKKF | seqid_2606 |
| variant_3465 | KWKKFLKIPPPKFLKAAKKF | seqid_2607 |
| variant_3466 | RWKKFLKIPPPKFLKAAKKF | seqid_2608 |
| variant_3467 | FWKKFLKIPPPKFLKAAKKF | seqid_2609 |
| variant_3468 | KKKLLLKIPPPKFLKAAKKF | seqid_2610 |
| variant_3469 | RKKLLLKIPPPKFLKAAKKF | seqid_2611 |
| variant_3470 | FKKLLLKIPPPKFLKAAKKF | seqid_2612 |
| variant_3471 | KWKLLLKIPPPKFLKAAKKF | seqid_2613 |
| variant_3472 | RWKLLLKIPPPKFLKAAKKF | seqid_2614 |
| variant_3473 | FWKLLLKIPPPKFLKAAKKF | seqid_2615 |
| variant_3474 | KKKKLLKIPPPKFLKAAKKF | seqid_2616 |
| variant_3475 | RKKKLLKIPPPKFLKAAKKF | seqid_2617 |
| variant_3476 | FKKKLLKIPPPKFLKAAKKF | seqid_2618 |
| variant_3477 | KWKKLLKIPPPKFLKAAKKF | seqid_2619 |
| variant_3478 | RWKKLLKIPPPKFLKAAKKF | seqid_2620 |
| variant_3479 | FWKKLLKIPPPKFLKAAKKF | seqid_2621 |
| variant_3480 | KKKLFKKIPPPKFLKAAKKF | seqid_2622 |
| variant_3481 | RKKLFKKIPPPKFLKAAKKF | seqid_2623 |
| variant_3482 | FKKLFKKIPPPKFLKAAKKF | seqid_2624 |
| variant_3483 | KWKLFKKIPPPKFLKAAKKF | seqid_2625 |
| variant_3484 | RWKLFKKIPPPKFLKAAKKF | seqid_2626 |
| variant_3485 | FWKLFKKIPPPKFLKAAKKF | seqid_2627 |
| variant_3486 | KKKKFKKIPPPKFLKAAKKF | seqid_2628 |
| variant_3487 | RKKKFKKIPPPKFLKAAKKF | seqid_2629 |
| variant_3488 | FKKKFKKIPPPKFLKAAKKF | seqid_2630 |
| variant_3489 | KWKKFKKIPPPKFLKAAKKF | seqid_2631 |
| variant_3490 | RWKKFKKIPPPKFLKAAKKF | seqid_2632 |
| variant_3491 | FWKKFKKIPPPKFLKAAKKF | seqid_2633 |
| variant_3492 | KKKLLKKIPPPKFLKAAKKF | seqid_2634 |
| variant_3493 | RKKLLKKIPPPKFLKAAKKF | seqid_2635 |
| variant_3494 | FKKLLKKIPPPKFLKAAKKF | seqid_2636 |
| variant_3495 | KWKLLKKIPPPKFLKAAKKF | seqid_2637 |
| variant_3496 | RWKLLKKIPPPKFLKAAKKF | seqid_2638 |
| variant_3497 | FWKLLKKIPPPKFLKAAKKF | seqid_2639 |
| variant_3498 | KKKKLKKIPPPKFLKAAKKF | seqid_2640 |
| variant_3499 | RKKKLKKIPPPKFLKAAKKF | seqid_2641 |
| variant_3500 | FKKKLKKIPPPKFLKAAKKF | seqid_2642 |
| variant_3501 | KWKKLKKIPPPKFLKAAKKF | seqid_2643 |
| variant_3502 | RWKKLKKIPPPKFLKAAKKF | seqid_2644 |
| variant_3503 | FWKKLKKIPPPKFLKAAKKF | seqid_2645 |
| variant_3504 | KKKLFLKIPPKFLKAAKKF | seqid_2646 |
| variant_3505 | RKKLFLKIPPKFLKAAKKF | seqid_2647 |
| variant_3506 | FKKLFLKIPPKFLKAAKKF | seqid_2648 |
| variant_3507 | KWKLFLKIPPKFLKAAKKF | seqid_2649 |
| variant_3508 | RWKLFLKIPPKFLKAAKKF | seqid_2650 |
| variant_3509 | FWKLFLKIPPKFLKAAKKF | seqid_2651 |
| variant_3510 | KKKKFLKIPPKFLKAAKKF | seqid_2652 |
| variant_3511 | RKKKFLKIPPKFLKAAKKF | seqid_2653 |
| variant_3512 | FKKKFLKIPPKFLKAAKKF | seqid_2654 |
| variant_3513 | KWKKFLKIPPKFLKAAKKF | seqid_2655 |
| variant_3514 | RWKKFLKIPPKFLKAAKKF | seqid_2656 |
| variant_3515 | FWKKFLKIPPKFLKAAKKF | seqid_2657 |
| variant_3516 | KKKLLLKIPPKFLKAAKKF | seqid_2658 |
| variant_3517 | RKKLLLKIPPKFLKAAKKF | seqid_2659 |
| variant_3518 | FKKLLLKIPPKFLKAAKKF | seqid_2660 |
| variant_3519 | KWKLLLKIPPKFLKAAKKF | seqid_2661 |
| variant_3520 | RWKLLLKIPPKFLKAAKKF | seqid_2662 |
| variant_3521 | FWKLLLKIPPKFLKAAKKF | seqid_2663 |
| variant_3522 | KKKKLLKIPPKFLKAAKKF | seqid_2664 |
| variant_3523 | RKKKLLKIPPKFLKAAKKF | seqid_2665 |
| variant_3524 | FKKKLLKIPPKFLKAAKKF | seqid_2666 |
| variant_3525 | KWKKLLKIPPKFLKAAKKF | seqid_2667 |
| variant_3526 | RWKKLLKIPPKFLKAAKKF | seqid_2668 |
| variant_3527 | FWKKLLKIPPKFLKAAKKF | seqid_2669 |
| variant_3528 | KKKLFKKIPPKFLKAAKKF | seqid_2670 |
| variant_3529 | RKKLFKKIPPKFLKAAKKF | seqid_2671 |
| variant_3530 | FKKLFKKIPPKFLKAAKKF | seqid_2672 |
| variant_3531 | KWKLFKKIPPKFLKAAKKF | seqid_2673 |
| variant_3532 | RWKLFKKIPPKFLKAAKKF | seqid_2674 |
| variant_3533 | FWKLFKKIPPKFLKAAKKF | seqid_2675 |
| variant_3534 | KKKKFKKIPPKFLKAAKKF | seqid_2676 |
| variant_3535 | RKKKFKKIPPKFLKAAKKF | seqid_2677 |
| variant_3536 | FKKKFKKIPPKFLKAAKKF | seqid_2678 |
| variant_3537 | KWKKFKKIPPKFLKAAKKF | seqid_2679 |
| variant_3538 | RWKKFKKIPPKFLKAAKKF | seqid_2680 |
| variant_3539 | FWKKFKKIPPKFLKAAKKF | seqid_2681 |
| variant_3540 | KKKLLKKIPPKFLKAAKKF | seqid_2682 |
| variant_3541 | RKKLLKKIPPKFLKAAKKF | seqid_2683 |
| variant_3542 | FKKLLKKIPPKFLKAAKKF | seqid_2684 |
| variant_3543 | KWKLLKKIPPKFLKAAKKF | seqid_2685 |
| variant_3544 | RWKLLKKIPPKFLKAAKKF | seqid_2686 |
| variant_3545 | FWKLLKKIPPKFLKAAKKF | seqid_2687 |
| variant_3546 | KKKKLKKIPPKFLKAAKKF | seqid_2688 |
| variant_3547 | RKKKLKKIPPKFLKAAKKF | seqid_2689 |
| variant_3548 | FKKKLKKIPPKFLKAAKKF | seqid_2690 |
| variant_3549 | KWKKLKKIPPKFLKAAKKF | seqid_2691 |
| variant_3550 | RWKKLKKIPPKFLKAAKKF | seqid_2692 |
| variant_3551 | FWKKLKKIPPKFLKAAKKF | seqid_2693 |
| variant_3600 | KKKLFLKIPKFLKAAKKF | seqid_2694 |
| variant_3601 | RKKLFLKIPKFLKAAKKF | seqid_2695 |
| variant_3602 | FKKLFLKIPKFLKAAKKF | seqid_2696 |
| variant_3603 | KWKLFLKIPKFLKAAKKF | seqid_2697 |
| variant_3604 | RWKLFLKIPKFLKAAKKF | seqid_2698 |
| variant_3605 | FWKLFLKIPKFLKAAKKF | seqid_2699 |
| variant_3606 | KKKKFLKIPKFLKAAKKF | seqid_2700 |
| variant_3607 | RKKKFLKIPKFLKAAKKF | seqid_2701 |
| variant_3608 | FKKKFLKIPKFLKAAKKF | seqid_2702 |
| variant_3609 | KWKKFLKIPKFLKAAKKF | seqid_2703 |
| variant_3610 | RWKKFLKIPKFLKAAKKF | seqid_2704 |
| variant_3611 | FWKKFLKIPKFLKAAKKF | seqid_2705 |
| variant_3612 | KKKLLLKIPKFLKAAKKF | seqid_2706 |
| variant_3613 | RKKLLLKIPKFLKAAKKF | seqid_2707 |
| variant_3614 | FKKLLLKIPKFLKAAKKF | seqid_2708 |
| variant_3615 | KWKLLLKIPKFLKAAKKF | seqid_2709 |
| variant_3616 | RWKLLLKIPKFLKAAKKF | seqid_2710 |
| variant_3617 | FWKLLLKIPKFLKAAKKF | seqid_2711 |
| variant_3618 | KKKKLLKIPKFLKAAKKF | seqid_2712 |
| variant_3619 | RKKKLLKIPKFLKAAKKF | seqid_2713 |
| variant_3620 | FKKKLLKIPKFLKAAKKF | seqid_2714 |
| variant_3621 | KWKKLLKIPKFLKAAKKF | seqid_2715 |
| variant_3622 | RWKKLLKIPKFLKAAKKF | seqid_2716 |
| variant_3623 | FWKKLLKIPKFLKAAKKF | seqid_2717 |
| variant_3624 | KKKLFKKIPKFLKAAKKF | seqid_2718 |
| variant_3625 | RKKLFKKIPKFLKAAKKF | seqid_2719 |
| variant_3626 | FKKLFKKIPKFLKAAKKF | seqid_2720 |
| variant_3627 | KWKLFKKIPKFLKAAKKF | seqid_2721 |
| variant_3628 | RWKLFKKIPKFLKAAKKF | seqid_2722 |
| variant_3629 | FWKLFKKIPKFLKAAKKF | seqid_2723 |
| variant_3630 | KKKKFKKIPKFLKAAKKF | seqid_2724 |
| variant_3631 | RKKKFKKIPKFLKAAKKF | seqid_2725 |
| variant_3632 | FKKKFKKIPKFLKAAKKF | seqid_2726 |
| variant_3633 | KWKKFKKIPKFLKAAKKF | seqid_2727 |
| variant_3634 | RWKKFKKIPKFLKAAKKF | seqid_2728 |
| variant_3635 | FWKKFKKIPKFLKAAKKF | seqid_2729 |
| variant_3636 | KKKLLKKIPKFLKAAKKF | seqid_2730 |
| variant_3637 | RKKLLKKIPKFLKAAKKF | seqid_2731 |
| variant_3638 | FKKLLKKIPKFLKAAKKF | seqid_2732 |
| variant_3639 | KWKLLKKIPKFLKAAKKF | seqid_2733 |
| variant_3640 | RWKLLKKIPKFLKAAKKF | seqid_2734 |
| variant_3641 | FWKLLKKIPKFLKAAKKF | seqid_2735 |
| variant_3642 | KKKKLKKIPKFLKAAKKF | seqid_2736 |
| variant_3643 | RKKKLKKIPKFLKAAKKF | seqid_2737 |
| variant_3644 | FKKKLKKIPKFLKAAKKF | seqid_2738 |
| variant_3645 | KWKKLKKIPKFLKAAKKF | seqid_2739 |
| variant_3646 | RWKKLKKIPKFLKAAKKF | seqid_2740 |
| variant_3647 | FWKKLKKIPKFLKAAKKF | seqid_2741 |
| variant_3648 | KKKLFLKIPPPKFKKAAKKF | seqid_2742 |
| variant_3649 | RKKLFLKIPPPKFKKAAKKF | seqid_2743 |
| variant_3650 | FKKLFLKIPPPKFKKAAKKF | seqid_2744 |
| variant_3651 | KWKLFLKIPPPKFKKAAKKF | seqid_2745 |
| variant_3652 | RWKLFLKIPPPKFKKAAKKF | seqid_2746 |
| variant_3653 | FWKLFLKIPPPKFKKAAKKF | seqid_2747 |
| variant_3654 | KKKKFLKIPPPKFKKAAKKF | seqid_2748 |
| variant_3655 | RKKKFLKIPPPKFKKAAKKF | seqid_2749 |
| variant_3656 | FKKKFLKIPPPKFKKAAKKF | seqid_2750 |
| variant_3657 | KWKKFLKIPPPKFKKAAKKF | seqid_2751 |
| variant_3658 | RWKKFLKIPPPKFKKAAKKF | seqid_2752 |
| variant_3659 | FWKKFLKIPPPKFKKAAKKF | seqid_2753 |
| variant_3660 | KKKLLLKIPPPKFKKAAKKF | seqid_2754 |
| variant_3661 | RKKLLLKIPPPKFKKAAKKF | seqid_2755 |
| variant_3662 | FKKLLLKIPPPKFKKAAKKF | seqid_2756 |
| variant_3663 | KWKLLLKIPPPKFKKAAKKF | seqid_2757 |
| variant_3664 | RWKLLLKIPPPKFKKAAKKF | seqid_2758 |
| variant_3665 | FWKLLLKIPPPKFKKAAKKF | seqid_2759 |
| variant_3666 | KKKKLLKIPPPKFKKAAKKF | seqid_2760 |
| variant_3667 | RKKKLLKIPPPKFKKAAKKF | seqid_2761 |
| variant_3668 | FKKKLLKIPPPKFKKAAKKF | seqid_2762 |
| variant_3669 | KWKKLLKIPPPKFKKAAKKF | seqid_2763 |
| variant_3670 | RWKKLLKIPPPKFKKAAKKF | seqid_2764 |
| variant_3671 | FWKKLLKIPPPKFKKAAKKF | seqid_2765 |
| variant_3672 | KKKLFKKIPPPKFKKAAKKF | seqid_2766 |
| variant_3673 | RKKLFKKIPPPKFKKAAKKF | seqid_2767 |
| variant_3674 | FKKLFKKIPPPKFKKAAKKF | seqid_2768 |
| variant_3675 | KWKLFKKIPPPKFKKAAKKF | seqid_2769 |
| variant_3676 | RWKLFKKIPPPKFKKAAKKF | seqid_2770 |
| variant_3677 | FWKLFKKIPPPKFKKAAKKF | seqid_2771 |
| variant_3678 | KKKKFKKIPPPKFKKAAKKF | seqid_2772 |
| variant_3679 | RKKKFKKIPPPKFKKAAKKF | seqid_2773 |
| variant_3680 | FKKKFKKIPPPKFKKAAKKF | seqid_2774 |
| variant_3681 | KWKKFKKIPPPKFKKAAKKF | seqid_2775 |
| variant_3682 | RWKKFKKIPPPKFKKAAKKF | seqid_2776 |
| variant_3683 | FWKKFKKIPPPKFKKAAKKF | seqid_2777 |
| variant_3684 | KKKLLKKIPPPKFKKAAKKF | seqid_2778 |
| variant_3685 | RKKLLKKIPPPKFKKAAKKF | seqid_2779 |
| variant_3686 | FKKLLKKIPPPKFKKAAKKF | seqid_2780 |
| variant_3687 | KWKLLKKIPPPKFKKAAKKF | seqid_2781 |
| variant_3688 | RWKLLKKIPPPKFKKAAKKF | seqid_2782 |
| variant_3689 | FWKLLKKIPPPKFKKAAKKF | seqid_2783 |
| variant_3690 | KKKKLKKIPPPKFKKAAKKF | seqid_2784 |
| variant_3691 | RKKKLKKIPPPKFKKAAKKF | seqid_2785 |
| variant_3692 | FKKKLKKIPPPKFKKAAKKF | seqid_2786 |
| variant_3693 | KWKKLKKIPPPKFKKAAKKF | seqid_2787 |
| variant_3694 | RWKKLKKIPPPKFKKAAKKF | seqid_2788 |
| variant_3695 | FWKKLKKIPPPKFKKAAKKF | seqid_2789 |
| variant_3696 | KKKLFLKIPPKFKKAAKKF | seqid_2790 |
| variant_3697 | RKKLFLKIPPKFKKAAKKF | seqid_2791 |
| variant_3698 | FKKLFLKIPPKFKKAAKKF | seqid_2792 |
| variant_3699 | KWKLFLKIPPKFKKAAKKF | seqid_2793 |
| variant_3700 | RWKLFLKIPPKFKKAAKKF | seqid_2794 |
| variant_3701 | FWKLFLKIPPKFKKAAKKF | seqid_2795 |
| variant_3702 | KKKKFLKIPPKFKKAAKKF | seqid_2796 |
| variant_3703 | RKKKFLKIPPKFKKAAKKF | seqid_2797 |
| variant_3704 | FKKKFLKIPPKFKKAAKKF | seqid_2798 |
| variant_3705 | KWKKFLKIPPKFKKAAKKF | seqid_2799 |
| variant_3706 | RWKKFLKIPPKFKKAAKKF | seqid_2800 |
| variant_3707 | FWKKFLKIPPKFKKAAKKF | seqid_2801 |
| variant_3708 | KKKLLLKIPPKFKKAAKKF | seqid_2802 |
| variant_3709 | RKKLLLKIPPKFKKAAKKF | seqid_2803 |
| variant_3710 | FKKLLLKIPPKFKKAAKKF | seqid_2804 |
| variant_3711 | KWKLLLKIPPKFKKAAKKF | seqid_2805 |
| variant_3712 | RWKLLLKIPPKFKKAAKKF | seqid_2806 |
| variant_3713 | FWKLLLKIPPKFKKAAKKF | seqid_2807 |
| variant_3714 | KKKKLLKIPPKFKKAAKKF | seqid_2808 |
| variant_3715 | RKKKLLKIPPKFKKAAKKF | seqid_2809 |
| variant_3716 | FKKKLLKIPPKFKKAAKKF | seqid_2810 |
| variant_3717 | KWKKLLKIPPKFKKAAKKF | seqid_2811 |
| variant_3718 | RWKKLLKIPPKFKKAAKKF | seqid_2812 |
| variant_3719 | FWKKLLKIPPKFKKAAKKF | seqid_2813 |
| variant_3720 | KKKLFKKIPPKFKKAAKKF | seqid_2814 |
| variant_3721 | RKKLFKKIPPKFKKAAKKF | seqid_2815 |
| variant_3722 | FKKLFKKIPPKFKKAAKKF | seqid_2816 |
| variant_3723 | KWKLFKKIPPKFKKAAKKF | seqid_2817 |
| variant_3724 | RWKLFKKIPPKFKKAAKKF | seqid_2818 |
| variant_3725 | FWKLFKKIPPKFKKAAKKF | seqid_2819 |
| variant_3726 | KKKKFKKIPPKFKKAAKKF | seqid_2820 |
| variant_3727 | RKKKFKKIPPKFKKAAKKF | seqid_2821 |
| variant_3728 | FKKKFKKIPPKFKKAAKKF | seqid_2822 |
| variant_3729 | KWKKFKKIPPKFKKAAKKF | seqid_2823 |
| variant_3730 | RWKKFKKIPPKFKKAAKKF | seqid_2824 |
| variant_3731 | FWKKFKKIPPKFKKAAKKF | seqid_2825 |
| variant_3732 | KKKLLKKIPPKFKKAAKKF | seqid_2826 |
| variant_3733 | RKKLLKKIPPKFKKAAKKF | seqid_2827 |
| variant_3734 | FKKLLKKIPPKFKKAAKKF | seqid_2828 |
| variant_3735 | KWKLLKKIPPKFKKAAKKF | seqid_2829 |
| variant_3736 | RWKLLKKIPPKFKKAAKKF | seqid_2830 |
| variant_3737 | FWKLLKKIPPKFKKAAKKF | seqid_2831 |
| variant_3738 | KKKKLKKIPPKFKKAAKKF | seqid_2832 |
| variant_3739 | RKKKLKKIPPKFKKAAKKF | seqid_2833 |
| variant_3740 | FKKKLKKIPPKFKKAAKKF | seqid_2834 |
| variant_3741 | KWKKLKKIPPKFKKAAKKF | seqid_2835 |
| variant_3742 | RWKKLKKIPPKFKKAAKKF | seqid_2836 |
| variant_3743 | FWKKLKKIPPKFKKAAKKF | seqid_2837 |
| variant_3792 | KKKLFLKIPKFKKAAKKF | seqid_2838 |
| variant_3793 | RKKLFLKIPKFKKAAKKF | seqid_2839 |
| variant_3794 | FKKLFLKIPKFKKAAKKF | seqid_2840 |
| variant_3795 | KWKLFLKIPKFKKAAKKF | seqid_2841 |
| variant_3796 | RWKLFLKIPKFKKAAKKF | seqid_2842 |
| variant_3797 | FWKLFLKIPKFKKAAKKF | seqid_2843 |
| variant_3798 | KKKKFLKIPKFKKAAKKF | seqid_2844 |
| variant_3799 | RKKKFLKIPKFKKAAKKF | seqid_2845 |
| variant_3800 | FKKKFLKIPKFKKAAKKF | seqid_2846 |
| variant_3801 | KWKKFLKIPKFKKAAKKF | seqid_2847 |
| variant_3802 | RWKKFLKIPKFKKAAKKF | seqid_2848 |
| variant_3803 | FWKKFLKIPKFKKAAKKF | seqid_2849 |
| variant_3804 | KKKLLLKIPKFKKAAKKF | seqid_2850 |
| variant_3805 | RKKLLLKIPKFKKAAKKF | seqid_2851 |
| variant_3806 | FKKLLLKIPKFKKAAKKF | seqid_2852 |
| variant_3807 | KWKLLLKIPKFKKAAKKF | seqid_2853 |
| variant_3808 | RWKLLLKIPKFKKAAKKF | seqid_2854 |
| variant_3809 | FWKLLLKIPKFKKAAKKF | seqid_2855 |
| variant_3810 | KKKKLLKIPKFKKAAKKF | seqid_2856 |
| variant_3811 | RKKKLLKIPKFKKAAKKF | seqid_2857 |
| variant_3812 | FKKKLLKIPKFKKAAKKF | seqid_2858 |
| variant_3813 | KWKKLLKIPKFKKAAKKF | seqid_2859 |
| variant_3814 | RWKKLLKIPKFKKAAKKF | seqid_2860 |
| variant_3815 | FWKKLLKIPKFKKAAKKF | seqid_2861 |
| variant_3816 | KKKLFKKIPKFKKAAKKF | seqid_2862 |
| variant_3817 | RKKLFKKIPKFKKAAKKF | seqid_2863 |
| variant_3818 | FKKLFKKIPKFKKAAKKF | seqid_2864 |
| variant_3819 | KWKLFKKIPKFKKAAKKF | seqid_2865 |
| variant_3820 | RWKLFKKIPKFKKAAKKF | seqid_2866 |
| variant_3821 | FWKLFKKIPKFKKAAKKF | seqid_2867 |
| variant_3822 | KKKKFKKIPKFKKAAKKF | seqid_2868 |
| variant_3823 | RKKKFKKIPKFKKAAKKF | seqid_2869 |
| variant_3824 | FKKKFKKIPKFKKAAKKF | seqid_2870 |
| variant_3825 | KWKKFKKIPKFKKAAKKF | seqid_2871 |
| variant_3826 | RWKKFKKIPKFKKAAKKF | seqid_2872 |
| variant_3827 | FWKKFKKIPKFKKAAKKF | seqid_2873 |
| variant_3828 | KKKLLKKIPKFKKAAKKF | seqid_2874 |
| variant_3829 | RKKLLKKIPKFKKAAKKF | seqid_2875 |
| variant_3830 | FKKLLKKIPKFKKAAKKF | seqid_2876 |
| variant_3831 | KWKLLKKIPKFKKAAKKF | seqid_2877 |
| variant_3832 | RWKLLKKIPKFKKAAKKF | seqid_2878 |
| variant_3833 | FWKLLKKIPKFKKAAKKF | seqid_2879 |
| variant_3834 | KKKKLKKIPKFKKAAKKF | seqid_2880 |
| variant_3835 | RKKKLKKIPKFKKAAKKF | seqid_2881 |
| variant_3836 | FKKKLKKIPKFKKAAKKF | seqid_2882 |
| variant_3837 | KWKKLKKIPKFKKAAKKF | seqid_2883 |
| variant_3838 | RWKKLKKIPKFKKAAKKF | seqid_2884 |
| variant_3839 | FWKKLKKIPKFKKAAKKF | seqid_2885 |
| variant_3840 | KKKLFLKIPPPKFLHLAKKF | seqid_2886 |
| variant_3841 | RKKLFLKIPPPKFLHLAKKF | seqid_2887 |
| variant_3842 | FKKLFLKIPPPKFLHLAKKF | seqid_2888 |
| variant_3843 | KWKLFLKIPPPKFLHLAKKF | seqid_2889 |
| variant_3844 | RWKLFLKIPPPKFLHLAKKF | seqid_2890 |
| variant_3845 | FWKLFLKIPPPKFLHLAKKF | seqid_2891 |
| variant_3846 | KKKKFLKIPPPKFLHLAKKF | seqid_2892 |
| variant_3847 | RKKKFLKIPPPKFLHLAKKF | seqid_2893 |
| variant_3848 | FKKKFLKIPPPKFLHLAKKF | seqid_2894 |
| variant_3849 | KWKKFLKIPPPKFLHLAKKF | seqid_2895 |
| variant_3850 | RWKKFLKIPPPKFLHLAKKF | seqid_2896 |
| variant_3851 | FWKKFLKIPPPKFLHLAKKF | seqid_2897 |
| variant_3852 | KKKLLLKIPPPKFLHLAKKF | seqid_2898 |
| variant_3853 | RKKLLLKIPPPKFLHLAKKF | seqid_2899 |
| variant_3854 | FKKLLLKIPPPKFLHLAKKF | seqid_2900 |
| variant_3855 | KWKLLLKIPPPKFLHLAKKF | seqid_2901 |
| variant_3856 | RWKLLLKIPPPKFLHLAKKF | seqid_2902 |
| variant_3857 | FWKLLLKIPPPKFLHLAKKF | seqid_2903 |
| variant_3858 | KKKKLLKIPPPKFLHLAKKF | seqid_2904 |
| variant_3859 | RKKKLLKIPPPKFLHLAKKF | seqid_2905 |
| variant_3860 | FKKKLLKIPPPKFLHLAKKF | seqid_2906 |
| variant_3861 | KWKKLLKIPPPKFLHLAKKF | seqid_2907 |
| variant_3862 | RWKKLLKIPPPKFLHLAKKF | seqid_2908 |
| variant_3863 | FWKKLLKIPPPKFLHLAKKF | seqid_2909 |
| variant_3864 | KKKLFKKIPPPKFLHLAKKF | seqid_2910 |
| variant_3865 | RKKLFKKIPPPKFLHLAKKF | seqid_2911 |
| variant_3866 | FKKLFKKIPPPKFLHLAKKF | seqid_2912 |
| variant_3867 | KWKLFKKIPPPKFLHLAKKF | seqid_2913 |
| variant_3868 | RWKLFKKIPPPKFLHLAKKF | seqid_2914 |
| variant_3869 | FWKLFKKIPPPKFLHLAKKF | seqid_2915 |
| variant_3870 | KKKKFKKIPPPKFLHLAKKF | seqid_2916 |
| variant_3871 | RKKKFKKIPPPKFLHLAKKF | seqid_2917 |
| variant_3872 | FKKKFKKIPPPKFLHLAKKF | seqid_2918 |
| variant_3873 | KWKKFKKIPPPKFLHLAKKF | seqid_2919 |
| variant_3874 | RWKKFKKIPPPKFLHLAKKF | seqid_2920 |
| variant_3875 | FWKKFKKIPPPKFLHLAKKF | seqid_2921 |
| variant_3876 | KKKLLKKIPPPKFLHLAKKF | seqid_2922 |
| variant_3877 | RKKLLKKIPPPKFLHLAKKF | seqid_2923 |
| variant_3878 | FKKLLKKIPPPKFLHLAKKF | seqid_2924 |
| variant_3879 | KWKLLKKIPPPKFLHLAKKF | seqid_2925 |
| variant_3880 | RWKLLKKIPPPKFLHLAKKF | seqid_2926 |
| variant_3881 | FWKLLKKIPPPKFLHLAKKF | seqid_2927 |
| variant_3882 | KKKKLKKIPPPKFLHLAKKF | seqid_2928 |
| variant_3883 | RKKKLKKIPPPKFLHLAKKF | seqid_2929 |
| variant_3884 | FKKKLKKIPPPKFLHLAKKF | seqid_2930 |
| variant_3885 | KWKKLKKIPPPKFLHLAKKF | seqid_2931 |
| variant_3886 | RWKKLKKIPPPKFLHLAKKF | seqid_2932 |
| variant_3887 | FWKKLKKIPPPKFLHLAKKF | seqid_2933 |
| variant_3888 | KKKLFLKIPPKFLHLAKKF | seqid_2934 |
| variant_3889 | RKKLFLKIPPKFLHLAKKF | seqid_2935 |
| variant_3890 | FKKLFLKIPPKFLHLAKKF | seqid_2936 |
| variant_3891 | KWKLFLKIPPKFLHLAKKF | seqid_2937 |
| variant_3892 | RWKLFLKIPPKFLHLAKKF | seqid_2938 |
| variant_3893 | FWKLFLKIPPKFLHLAKKF | seqid_2939 |
| variant_3894 | KKKKFLKIPPKFLHLAKKF | seqid_2940 |
| variant_3895 | RKKKFLKIPPKFLHLAKKF | seqid_2941 |
| variant_3896 | FKKKFLKIPPKFLHLAKKF | seqid_2942 |
| variant_3897 | KWKKFLKIPPKFLHLAKKF | seqid_2943 |
| variant_3898 | RWKKFLKIPPKFLHLAKKF | seqid_2944 |
| variant_3899 | FWKKFLKIPPKFLHLAKKF | seqid_2945 |
| variant_3900 | KKKLLLKIPPKFLHLAKKF | seqid_2946 |
| variant_3901 | RKKLLLKIPPKFLHLAKKF | seqid_2947 |
| variant_3902 | FKKLLLKIPPKFLHLAKKF | seqid_2948 |
| variant_3903 | KWKLLLKIPPKFLHLAKKF | seqid_2949 |
| variant_3904 | RWKLLLKIPPKFLHLAKKF | seqid_2950 |
| variant_3905 | FWKLLLKIPPKFLHLAKKF | seqid_2951 |
| variant_3906 | KKKKLLKIPPKFLHLAKKF | seqid_2952 |
| variant_3907 | RKKKLLKIPPKFLHLAKKF | seqid_2953 |
| variant_3908 | FKKKLLKIPPKFLHLAKKF | seqid_2954 |
| variant_3909 | KWKKLLKIPPKFLHLAKKF | seqid_2955 |
| variant_3910 | RWKKLLKIPPKFLHLAKKF | seqid_2956 |
| variant_3911 | FWKKLLKIPPKFLHLAKKF | seqid_2957 |
| variant_3912 | KKKLFKKIPPKFLHLAKKF | seqid_2958 |
| variant_3913 | RKKLFKKIPPKFLHLAKKF | seqid_2959 |
| variant_3914 | FKKLFKKIPPKFLHLAKKF | seqid_2960 |
| variant_3915 | KWKLFKKIPPKFLHLAKKF | seqid_2961 |
| variant_3916 | RWKLFKKIPPKFLHLAKKF | seqid_2962 |
| variant_3917 | FWKLFKKIPPKFLHLAKKF | seqid_2963 |
| variant_3918 | KKKKFKKIPPKFLHLAKKF | seqid_2964 |
| variant_3919 | RKKKFKKIPPKFLHLAKKF | seqid_2965 |
| variant_3920 | FKKKFKKIPPKFLHLAKKF | seqid_2966 |
| variant_3921 | KWKKFKKIPPKFLHLAKKF | seqid_2967 |
| variant_3922 | RWKKFKKIPPKFLHLAKKF | seqid_2968 |
| variant_3923 | FWKKFKKIPPKFLHLAKKF | seqid_2969 |
| variant_3924 | KKKLLKKIPPKFLHLAKKF | seqid_2970 |
| variant_3925 | RKKLLKKIPPKFLHLAKKF | seqid_2971 |
| variant_3926 | FKKLLKKIPPKFLHLAKKF | seqid_2972 |
| variant_3927 | KWKLLKKIPPKFLHLAKKF | seqid_2973 |
| variant_3928 | RWKLLKKIPPKFLHLAKKF | seqid_2974 |
| variant_3929 | FWKLLKKIPPKFLHLAKKF | seqid_2975 |
| variant_3930 | KKKKLKKIPPKFLHLAKKF | seqid_2976 |
| variant_3931 | RKKKLKKIPPKFLHLAKKF | seqid_2977 |
| variant_3932 | FKKKLKKIPPKFLHLAKKF | seqid_2978 |
| variant_3933 | KWKKLKKIPPKFLHLAKKF | seqid_2979 |
| variant_3934 | RWKKLKKIPPKFLHLAKKF | seqid_2980 |
| variant_3935 | FWKKLKKIPPKFLHLAKKF | seqid_2981 |
| variant_3984 | KKKLFLKIPKFLHLAKKF | seqid_2982 |
| variant_3985 | RKKLFLKIPKFLHLAKKF | seqid_2983 |
| variant_3986 | FKKLFLKIPKFLHLAKKF | seqid_2984 |
| variant_3987 | KWKLFLKIPKFLHLAKKF | seqid_2985 |
| variant_3988 | RWKLFLKIPKFLHLAKKF | seqid_2986 |
| variant_3989 | FWKLFLKIPKFLHLAKKF | seqid_2987 |
| variant_3990 | KKKKFLKIPKFLHLAKKF | seqid_2988 |
| variant_3991 | RKKKFLKIPKFLHLAKKF | seqid_2989 |
| variant_3992 | FKKKFLKIPKFLHLAKKF | seqid_2990 |
| variant_3993 | KWKKFLKIPKFLHLAKKF | seqid_2991 |
| variant_3994 | RWKKFLKIPKFLHLAKKF | seqid_2992 |
| variant_3995 | FWKKFLKIPKFLHLAKKF | seqid_2993 |
| variant_3996 | KKKLLLKIPKFLHLAKKF | seqid_2994 |
| variant_3997 | RKKLLLKIPKFLHLAKKF | seqid_2995 |
| variant_3998 | FKKLLLKIPKFLHLAKKF | seqid_2996 |
| variant_3999 | KWKLLLKIPKFLHLAKKF | seqid_2997 |
| variant_4000 | RWKLLLKIPKFLHLAKKF | seqid_2998 |
| variant_4001 | FWKLLLKIPKFLHLAKKF | seqid_2999 |
| variant_4002 | KKKKLLKIPKFLHLAKKF | seqid_3000 |
| variant_4003 | RKKKLLKIPKFLHLAKKF | seqid_3001 |
| variant_4004 | FKKKLLKIPKFLHLAKKF | seqid_3002 |
| variant_4005 | KWKKLLKIPKFLHLAKKF | seqid_3003 |
| variant_4006 | RWKKLLKIPKFLHLAKKF | seqid_3004 |
| variant_4007 | FWKKLLKIPKFLHLAKKF | seqid_3005 |
| variant_4008 | KKKLFKKIPKFLHLAKKF | seqid_3006 |
| variant_4009 | RKKLFKKIPKFLHLAKKF | seqid_3007 |
| variant_4010 | FKKLFKKIPKFLHLAKKF | seqid_3008 |
| variant_4011 | KWKLFKKIPKFLHLAKKF | seqid_3 |
| variant_4012 | RWKLFKKIPKFLHLAKKF | seqid_4 |
| variant_4013 | FWKLFKKIPKFLHLAKKF | seqid_3009 |
| variant_4014 | KKKKFKKIPKFLHLAKKF | seqid_3010 |
| variant_4015 | RKKKFKKIPKFLHLAKKF | seqid_3011 |
| variant_4016 | FKKKFKKIPKFLHLAKKF | seqid_3012 |
| variant_4017 | KWKKFKKIPKFLHLAKKF | seqid_3013 |
| variant_4018 | RWKKFKKIPKFLHLAKKF | seqid_3014 |
| variant_4019 | FWKKFKKIPKFLHLAKKF | seqid_3015 |
| variant_4020 | KKKLLKKIPKFLHLAKKF | seqid_3016 |
| variant_4021 | RKKLLKKIPKFLHLAKKF | seqid_3017 |
| variant_4022 | FKKLLKKIPKFLHLAKKF | seqid_3018 |
| variant_4023 | KWKLLKKIPKFLHLAKKF | seqid_3019 |
| variant_4024 | RWKLLKKIPKFLHLAKKF | seqid_3020 |
| variant_4025 | FWKLLKKIPKFLHLAKKF | seqid_3021 |
| variant_4026 | KKKKLKKIPKFLHLAKKF | seqid_3022 |
| variant_4027 | RKKKLKKIPKFLHLAKKF | seqid_3023 |
| variant_4028 | FKKKLKKIPKFLHLAKKF | seqid_3024 |
| variant_4029 | KWKKLKKIPKFLHLAKKF | seqid_3025 |
| variant_4030 | RWKKLKKIPKFLHLAKKF | seqid_3026 |
| variant_4031 | FWKKLKKIPKFLHLAKKF | seqid_3027 |
| variant_4032 | KKKLFLKIPPPKFKHLAKKF | seqid_3028 |
| variant_4033 | RKKLFLKIPPPKFKHLAKKF | seqid_3029 |
| variant_4034 | FKKLFLKIPPPKFKHLAKKF | seqid_3030 |
| variant_4035 | KWKLFLKIPPPKFKHLAKKF | seqid_3031 |
| variant_4036 | RWKLFLKIPPPKFKHLAKKF | seqid_3032 |
| variant_4037 | FWKLFLKIPPPKFKHLAKKF | seqid_3033 |
| variant_4038 | KKKKFLKIPPPKFKHLAKKF | seqid_3034 |
| variant_4039 | RKKKFLKIPPPKFKHLAKKF | seqid_3035 |
| variant_4040 | FKKKFLKIPPPKFKHLAKKF | seqid_3036 |
| variant_4041 | KWKKFLKIPPPKFKHLAKKF | seqid_3037 |
| variant_4042 | RWKKFLKIPPPKFKHLAKKF | seqid_3038 |
| variant_4043 | FWKKFLKIPPPKFKHLAKKF | seqid_3039 |
| variant_4044 | KKKLLLKIPPPKFKHLAKKF | seqid_3040 |
| variant_4045 | RKKLLLKIPPPKFKHLAKKF | seqid_3041 |
| variant_4046 | FKKLLLKIPPPKFKHLAKKF | seqid_3042 |
| variant_4047 | KWKLLLKIPPPKFKHLAKKF | seqid_3043 |
| variant_4048 | RWKLLLKIPPPKFKHLAKKF | seqid_3044 |
| variant_4049 | FWKLLLKIPPPKFKHLAKKF | seqid_3045 |
| variant_4050 | KKKKLLKIPPPKFKHLAKKF | seqid_3046 |
| variant_4051 | RKKKLLKIPPPKFKHLAKKF | seqid_3047 |
| variant_4052 | FKKKLLKIPPPKFKHLAKKF | seqid_3048 |
| variant_4053 | KWKKLLKIPPPKFKHLAKKF | seqid_3049 |
| variant_4054 | RWKKLLKIPPPKFKHLAKKF | seqid_3050 |
| variant_4055 | FWKKLLKIPPPKFKHLAKKF | seqid_3051 |
| variant_4056 | KKKLFKKIPPPKFKHLAKKF | seqid_3052 |
| variant_4057 | RKKLFKKIPPPKFKHLAKKF | seqid_3053 |
| variant_4058 | FKKLFKKIPPPKFKHLAKKF | seqid_3054 |
| variant_4059 | KWKLFKKIPPPKFKHLAKKF | seqid_3055 |
| variant_4060 | RWKLFKKIPPPKFKHLAKKF | seqid_3056 |
| variant_4061 | FWKLFKKIPPPKFKHLAKKF | seqid_3057 |
| variant_4062 | KKKKFKKIPPPKFKHLAKKF | seqid_3058 |
| variant_4063 | RKKKFKKIPPPKFKHLAKKF | seqid_3059 |
| variant_4064 | FKKKFKKIPPPKFKHLAKKF | seqid_3060 |
| variant_4065 | KWKKFKKIPPPKFKHLAKKF | seqid_3061 |
| variant_4066 | RWKKFKKIPPPKFKHLAKKF | seqid_3062 |
| variant_4067 | FWKKFKKIPPPKFKHLAKKF | seqid_3063 |
| variant_4068 | KKKLLKKIPPPKFKHLAKKF | seqid_3064 |
| variant_4069 | RKKLLKKIPPPKFKHLAKKF | seqid_3065 |
| variant_4070 | FKKLLKKIPPPKFKHLAKKF | seqid_3066 |
| variant_4071 | KWKLLKKIPPPKFKHLAKKF | seqid_3067 |
| variant_4072 | RWKLLKKIPPPKFKHLAKKF | seqid_3068 |
| variant_4073 | FWKLLKKIPPPKFKHLAKKF | seqid_3069 |
| variant_4074 | KKKKLKKIPPPKFKHLAKKF | seqid_3070 |
| variant_4075 | RKKKLKKIPPPKFKHLAKKF | seqid_3071 |
| variant_4076 | FKKKLKKIPPPKFKHLAKKF | seqid_3072 |
| variant_4077 | KWKKLKKIPPPKFKHLAKKF | seqid_3073 |
| variant_4078 | RWKKLKKPPPKFKHLAKKF | seqid_3074 |
| variant_4079 | FWKKLKKIPPPKFKHLAKKF | seqid_3075 |
| variant_4080 | KKKLFLKIPPKFKHLAKKF | seqid_3076 |
| variant_4081 | RKKLFLKIPPKFKHLAKKF | seqid_3077 |
| variant_4082 | FKKLFLKIPPKFKHLAKKF | seqid_3078 |
| variant_4083 | KWKLFLKIPPKFKHLAKKF | seqid_3079 |
| variant_4084 | RWKLFLKIPPKFKHLAKKF | seqid_3080 |
| variant_4085 | FWKLFLKIPPKFKHLAKKF | seqid_3081 |
| variant_4086 | KKKKFLKIPPKFKHLAKKF | seqid_3082 |
| variant_4087 | RKKKFLKIPPKFKHLAKKF | seqid_3083 |
| variant_4088 | FKKKFLKIPPKFKHLAKKF | seqid_3084 |
| variant_4089 | KWKKFLKIPPKFKHLAKKF | seqid_3085 |
| variant_4090 | RWKKFLKIPPKFKHLAKKF | seqid_3086 |
| variant_4091 | FWKKFLKIPPKFKHLAKKF | seqid_3087 |
| variant_4092 | KKKLLLKIPPKFKHLAKKF | seqid_3088 |
| variant_4093 | RKKLLLKIPPKFKHLAKKF | seqid_3089 |
| variant_4094 | FKKLLLKIPPKFKHLAKKF | seqid_3090 |
| variant_4095 | KWKLLLKIPPKFKHLAKKF | seqid_3091 |
| variant_4096 | RWKLLLKIPPKFKHLAKKF | seqid_3092 |
| variant_4097 | FWKLLLKIPPKFKHLAKKF | seqid_3093 |
| variant_4098 | KKKKLLKIPPKFKHLAKKF | seqid_3094 |
| variant_4099 | RKKKLLKIPPKFKHLAKKF | seqid_3095 |
| variant_4100 | FKKKLLKIPPKFKHLAKKF | seqid_3096 |
| variant_4101 | KWKKLLKIPPKFKHLAKKF | seqid_3097 |
| variant_4102 | RWKKLLKIPPKFKHLAKKF | seqid_3098 |
| variant_4103 | FWKKLLKIPPKFKHLAKKF | seqid_3099 |
| variant_4104 | KKKLFKKIPPKFKHLAKKF | seqid_3100 |
| variant_4105 | RKKLFKKIPPKFKHLAKKF | seqid_3101 |
| variant_4106 | FKKLFKKIPPKFKHLAKKF | seqid_3102 |
| variant_4107 | KWKLFKKIPPKFKHLAKKF | seqid_3103 |
| variant_4108 | RWKLFKKIPPKFKHLAKKF | seqid_3104 |
| variant_4109 | FWKLFKKIPPKFKHLAKKF | seqid_3105 |
| variant_4110 | KKKKFKKIPPKFKHLAKKF | seqid_3106 |
| variant_4111 | RKKKFKKIPPKFKHLAKKF | seqid_3107 |
| variant_4112 | FKKKFKKIPPKFKHLAKKF | seqid_3108 |
| variant_4113 | KWKKFKKIPPKFKHLAKKF | seqid_3109 |
| variant_4114 | RWKKFKKIPPKFKHLAKKF | seqid_3110 |
| variant_4115 | FWKKFKKIPPKFKHLAKKF | seqid_3111 |
| variant_4116 | KKKLLKKIPPKFKHLAKKF | seqid_3112 |
| variant_4117 | RKKLLKKIPPKFKHLAKKF | seqid_3113 |
| variant_4118 | FKKLLKKIPPKFKHLAKKF | seqid_3114 |
| variant_4119 | KWKLLKKIPPKFKHLAKKF | seqid_3115 |
| variant_4120 | RWKLLKKIPPKFKHLAKKF | seqid_3116 |
| variant_4121 | FWKLLKKIPPKFKHLAKKF | seqid_3117 |
| variant_4122 | KKKKLKKIPPKFKHLAKKF | seqid_3118 |
| variant_4123 | RKKKLKKIPPKFKHLAKKF | seqid_3119 |
| variant_4124 | FKKKLKKIPPKFKHLAKKF | seqid_3120 |
| variant_4125 | KWKKLKKIPPKFKHLAKKF | seqid_3121 |
| variant_4126 | RWKKLKKIPPKFKHLAKKF | seqid_3122 |
| variant_4127 | FWKKLKKIPPKFKHLAKKF | seqid_3123 |
| variant_4176 | KKKLFLKIPKFKHLAKKF | seqid_3124 |
| variant_4177 | RKKLFLKIPKFKHLAKKF | seqid_3125 |
| variant_4178 | FKKLFLKIPKFKHLAKKF | seqid_3126 |
| variant_4179 | KWKLFLKIPKFKHLAKKF | seqid_3127 |
| variant_4180 | RWKLFLKIPKFKHLAKKF | seqid_3128 |
| variant_4181 | FWKLFLKIPKFKHLAKKF | seqid_3129 |
| variant_4182 | KKKKFLKIPKFKHLAKKF | seqid_3130 |
| variant_4183 | RKKKFLKIPKFKHLAKKF | seqid_3131 |
| variant_4184 | FKKKFLKIPKFKHLAKKF | seqid_3132 |
| variant_4185 | KWKKFLKIPKFKHLAKKF | seqid_3133 |
| variant_4186 | RWKKFLKIPKFKHLAKKF | seqid_3134 |
| variant_4187 | FWKKFLKIPKFKHLAKKF | seqid_3135 |
| variant_4188 | KKKLLLKIPKFKHLAKKF | seqid_3136 |
| variant_4189 | RKKLLLKIPKFKHLAKKF | seqid_3137 |
| variant_4190 | FKKLLLKIPKFKHLAKKF | seqid_3138 |
| variant_4191 | KWKLLLKIPKFKHLAKKF | seqid_3139 |
| variant_4192 | RWKLLLKIPKFKHLAKKF | seqid_3140 |
| variant_4193 | FWKLLLKIPKFKHLAKKF | seqid_3141 |
| variant_4194 | KKKKLLKIPKFKHLAKKF | seqid_3142 |
| variant_4195 | RKKKLLKIPKFKHLAKKF | seqid_3143 |
| variant_4196 | FKKKLLKIPKFKHLAKKF | seqid_3144 |
| variant_4197 | KWKKLLKIPKFKHLAKKF | seqid_3145 |
| variant_4198 | RWKKLLKIPKFKHLAKKF | seqid_3146 |
| variant_4199 | FWKKLLKIPKFKHLAKKF | seqid_3147 |
| variant_4200 | KKKLFKKIPKFKHLAKKF | seqid_3148 |
| variant_4201 | RKKLFKKIPKFKHLAKKF | seqid_3149 |
| variant_4202 | FKKLFKKIPKFKHLAKKF | seqid_3150 |
| variant_4203 | KWKLFKKIPKFKHLAKKF | seqid_3151 |
| variant_4204 | RWKLFKKIPKFKHLAKKF | seqid_3152 |
| variant_4205 | FWKLFKKIPKFKHLAKKF | seqid_3153 |
| variant_4206 | KKKKFKKIPKFKHLAKKF | seqid_3154 |
| variant_4207 | RKKKFKKIPKFKHLAKKF | seqid_3155 |
| variant_4208 | FKKKFKKIPKFKHLAKKF | seqid_3156 |
| variant_4209 | KWKKFKKIPKFKHLAKKF | seqid_3157 |
| variant_4210 | RWKKFKKIPKFKHLAKKF | seqid_3158 |
| variant_4211 | FWKKFKKIPKFKHLAKKF | seqid_3159 |
| variant_4212 | KKKLLKKIPKFKHLAKKF | seqid_3160 |
| variant_4213 | RKKLLKKIPKFKHLAKKF | seqid_3161 |
| variant_4214 | FKKLLKKIPKFKHLAKKF | seqid_3162 |
| variant_4215 | KWKLLKKIPKFKHLAKKF | seqid_3163 |
| variant_4216 | RWKLLKKIPKFKHLAKKF | seqid_3164 |
| variant_4217 | FWKLLKKIPKFKHLAKKF | seqid_3165 |
| variant_4218 | KKKKLKKIPKFKHLAKKF | seqid_3166 |
| variant_4219 | RKKKLKKIPKFKHLAKKF | seqid_3167 |
| variant_4220 | FKKKLKKIPKFKHLAKKF | seqid_3168 |
| variant_4221 | KWKKLKKIPKFKHLAKKF | seqid_3169 |
| variant_4222 | RWKKLKKIPKFKHLAKKF | seqid_3170 |
| variant_4223 | FWKKLKKIPKFKHLAKKF | seqid_3171 |
| variant_4224 | KKKLFLKIPPPKFLKLAKKF | seqid_3172 |
| variant_4225 | RKKLFLKIPPPKFLKLAKKF | seqid_3173 |
| variant_4226 | FKKLFLKIPPPKFLKLAKKF | seqid_3174 |
| variant_4227 | KWKLFLKIPPPKFLKLAKKF | seqid_3175 |
| variant_4228 | RWKLFLKIPPPKFLKLAKKF | seqid_3176 |
| variant_4229 | FWKLFLKIPPPKFLKLAKKF | seqid_3177 |
| variant_4230 | KKKKFLKIPPPKFLKLAKKF | seqid_3178 |
| variant_4231 | RKKKFLKIPPPKFLKLAKKF | seqid_3179 |
| variant_4232 | FKKKFLKIPPPKFLKLAKKF | seqid_3180 |
| variant_4233 | KWKKFLKIPPPKFLKLAKKF | seqid_3181 |
| variant_4234 | RWKKFLKIPPPKFLKLAKKF | seqid_3182 |
| variant_4235 | FWKKFLKIPPPKFLKLAKKF | seqid_3183 |
| variant_4236 | KKKLLLKIPPPKFLKLAKKF | seqid_3184 |
| variant_4237 | RKKLLLKIPPPKFLKLAKKF | seqid_3185 |
| variant_4238 | FKKLLLKIPPPKFLKLAKKF | seqid_3186 |
| variant_4239 | KWKLLLKIPPPKFLKLAKKF | seqid_3187 |
| variant_4240 | RWKLLLKIPPPKFLKLAKKF | seqid_3188 |
| variant_4241 | FWKLLLKIPPPKFLKLAKKF | seqid_3189 |
| variant_4242 | KKKKLLKIPPPKFLKLAKKF | seqid_3190 |
| variant_4243 | RKKKLLKIPPPKFLKLAKKF | seqid_3191 |
| variant_4244 | FKKKLLKIPPPKFLKLAKKF | seqid_3192 |
| variant_4245 | KWKKLLKIPPPKFLKLAKKF | seqid_3193 |
| variant_4246 | RWKKLLKIPPPKFLKLAKKF | seqid_3194 |
| variant_4247 | FWKKLLKIPPPKFLKLAKKF | seqid_3195 |
| variant_4248 | KKKLFKKIPPPKFLKLAKKF | seqid_3196 |
| variant_4249 | RKKLFKKIPPPKFLKLAKKF | seqid_3197 |
| variant_4250 | FKKLFKKIPPPKFLKLAKKF | seqid_3198 |
| variant_4251 | KWKLFKKIPPPKFLKLAKKF | seqid_3199 |
| variant_4252 | RWKLFKKIPPPKFLKLAKKF | seqid_3200 |
| variant_4253 | FWKLFKKIPPPKFLKLAKKF | seqid_3201 |
| variant_4254 | KKKKFKKIPPPKFLKLAKKF | seqid_3202 |
| variant_4255 | RKKKFKKIPPPKFLKLAKKF | seqid_3203 |
| variant_4256 | FKKKFKKIPPPKFLKLAKKF | seqid_3204 |
| variant_4257 | KWKKFKKIPPPKFLKLAKKF | seqid_3205 |
| variant_4258 | RWKKFKKIPPPKFLKLAKKF | seqid_3206 |
| variant_4259 | FWKKFKKIPPPKFLKLAKKF | seqid_3207 |
| variant_4260 | KKKLLKKIPPPKFLKLAKKF | seqid_3208 |
| variant_4261 | RKKLLKKIPPPKFLKLAKKF | seqid_3209 |
| variant_4262 | FKKLLKKIPPPKFLKLAKKF | seqid_3210 |
| variant_4263 | KWKLLKKIPPPKFLKLAKKF | seqid_3211 |
| variant_4264 | RWKLLKKIPPPKFLKLAKKF | seqid_3212 |
| variant_4265 | FWKLLKKIPPPKFLKLAKKF | seqid_3213 |
| variant_4266 | KKKKLKKIPPPKFLKLAKKF | seqid_3214 |
| variant_4267 | RKKKLKKIPPPKFLKLAKKF | seqid_3215 |
| variant_4268 | FKKKLKKIPPPKFLKLAKKF | seqid_3216 |
| variant_4269 | KWKKLKKIPPPKFLKLAKKF | seqid_3217 |
| variant_4270 | RWKKLKKIPPPKFLKLAKKF | seqid_3218 |
| variant_4271 | FWKKLKKIPPPKFLKLAKKF | seqid_3219 |
| variant_4272 | KKKLFLKIPPKFLKLAKKF | seqid_3220 |
| variant_4273 | RKKLFLKIPPKFLKLAKKF | seqid_3221 |
| variant_4274 | FKKLFLKIPPKFLKLAKKF | seqid_3222 |
| variant_4275 | KWKLFLKIPPKFLKLAKKF | seqid_3223 |
| variant_4276 | RWKLFLKIPPKFLKLAKKF | seqid_3224 |
| variant_4277 | FWKLFLKIPPKFLKLAKKF | seqid_3225 |
| variant_4278 | KKKKFLKIPPKFLKLAKKF | seqid_3226 |
| variant_4279 | RKKKFLKIPPKFLKLAKKF | seqid_3227 |
| variant_4280 | FKKKFLKIPPKFLKLAKKF | seqid_3228 |
| variant_4281 | KWKKFLKIPPKFLKLAKKF | seqid_3229 |
| variant_4282 | RWKKFLKIPPKFLKLAKKF | seqid_3230 |
| variant_4283 | FWKKFLKIPPKFLKLAKKF | seqid_3231 |
| variant_4284 | KKKLLLKIPPKFLKLAKKF | seqid_3232 |
| variant_4285 | RKKLLLKIPPKFLKLAKKF | seqid_3233 |
| variant_4286 | FKKLLLKIPPKFLKLAKKF | seqid_3234 |
| variant_4287 | KWKLLLKIPPKFLKLAKKF | seqid_3235 |
| variant_4288 | RWKLLLKIPPKFLKLAKKF | seqid_3236 |
| variant_4289 | FWKLLLKIPPKFLKLAKKF | seqid_3237 |
| variant_4290 | KKKKLLKIPPKFLKLAKKF | seqid_3238 |
| variant_4291 | RKKKLLKIPPKFLKLAKKF | seqid_3239 |
| variant_4292 | FKKKLLKIPPKFLKLAKKF | seqid_3240 |
| variant_4293 | KWKKLLKIPPKFLKLAKKF | seqid_3241 |
| variant_4294 | RWKKLLKIPPKFLKLAKKF | seqid_3242 |
| variant_4295 | FWKKLLKIPPKFLKLAKKF | seqid_3243 |
| variant_4296 | KKKLFKKIPPKFLKLAKKF | seqid_3244 |
| variant_4297 | RKKLFKKIPPKFLKLAKKF | seqid_3245 |
| variant_4298 | FKKLFKKIPPKFLKLAKKF | seqid_3246 |
| variant_4299 | KWKLFKKIPPKFLKLAKKF | seqid_3247 |
| variant_4300 | RWKLFKKIPPKFLKLAKKF | seqid_3248 |
| variant_4301 | FWKLFKKIPPKFLKLAKKF | seqid_3249 |
| variant_4302 | KKKKFKKIPPKFLKLAKKF | seqid_3250 |
| variant_4303 | RKKKFKKIPPKFLKLAKKF | seqid_3251 |
| variant_4304 | FKKKFKKIPPKFLKLAKKF | seqid_3252 |
| variant_4305 | KWKKFKKIPPKFLKLAKKF | seqid_3253 |
| variant_4306 | RWKKFKKIPPKFLKLAKKF | seqid_3254 |
| variant_4307 | FWKKFKKIPPKFLKLAKKF | seqid_3255 |
| variant_4308 | KKKLLKKIPPKFLKLAKKF | seqid_3256 |
| variant_4309 | RKKLLKKIPPKFLKLAKKF | seqid_3257 |
| variant_4310 | FKKLLKKIPPKFLKLAKKF | seqid_3258 |
| variant_4311 | KWKLLKKIPPKFLKLAKKF | seqid_3259 |
| variant_4312 | RWKLLKKIPPKFLKLAKKF | seqid_3260 |
| variant_4313 | FWKLLKKIPPKFLKLAKKF | seqid_3261 |
| variant_4314 | KKKKLKKIPPKFLKLAKKF | seqid_3262 |
| variant_4315 | RKKKLKKIPPKFLKLAKKF | seqid_3263 |
| variant_4316 | FKKKLKKIPPKFLKLAKKF | seqid_3264 |
| variant_4317 | KWKKLKKIPPKFLKLAKKF | seqid_3265 |
| variant_4318 | RWKKLKKIPPKFLKLAKKF | seqid_3266 |
| variant_4319 | FWKKLKKIPPKFLKLAKKF | seqid_3267 |
| variant_4368 | KKKLFLKIPKFLKLAKKF | seqid_3268 |
| variant_4369 | RKKLFLKIPKFLKLAKKF | seqid_3269 |
| variant_4370 | FKKLFLKIPKFLKLAKKF | seqid_3270 |
| variant_4371 | KWKLFLKIPKFLKLAKKF | seqid_3271 |
| variant_4372 | RWKLFLKIPKFLKLAKKF | seqid_3272 |
| variant_4373 | FWKLFLKIPKFLKLAKKF | seqid_3273 |
| variant_4374 | KKKKFLKIPKFLKLAKKF | seqid_3274 |
| variant_4375 | RKKKFLKIPKFLKLAKKF | seqid_3275 |
| variant_4376 | FKKKFLKIPKFLKLAKKF | seqid_3276 |
| variant_4377 | KWKKFLKIPKFLKLAKKF | seqid_3277 |
| variant_4378 | RWKKFLKIPKFLKLAKKF | seqid_3278 |
| variant_4379 | FWKKFLKIPKFLKLAKKF | seqid_3279 |
| variant_4380 | KKKLLLKIPKFLKLAKKF | seqid_3280 |
| variant_4381 | RKKLLLKIPKFLKLAKKF | seqid_3281 |
| variant_4382 | FKKLLLKIPKFLKLAKKF | seqid_3282 |
| variant_4383 | KWKLLLKIPKFLKLAKKF | seqid_3283 |
| variant_4384 | RWKLLLKIPKFLKLAKKF | seqid_3284 |
| variant_4385 | FWKLLLKIPKFLKLAKKF | seqid_3285 |
| variant_4386 | KKKKLLKIPKFLKLAKKF | seqid_3286 |
| variant_4387 | RKKKLLKIPKFLKLAKKF | seqid_3287 |
| variant_4388 | FKKKLLKIPKFLKLAKKF | seqid_3288 |
| variant_4389 | KWKKLLKIPKFLKLAKKF | seqid_3289 |
| variant_4390 | RWKKLLKIPKFLKLAKKF | seqid_3290 |
| variant_4391 | FWKKLLKIPKFLKLAKKF | seqid_3291 |
| variant_4392 | KKKLFKKIPKFLKLAKKF | seqid_3292 |
| variant_4393 | RKKLFKKIPKFLKLAKKF | seqid_3293 |
| variant_4394 | FKKLFKKIPKFLKLAKKF | seqid_3294 |
| variant_4395 | KWKLFKKIPKFLKLAKKF | seqid_3295 |
| variant_4396 | RWKLFKKIPKFLKLAKKF | seqid_3296 |
| variant_4397 | FWKLFKKIPKFLKLAKKF | seqid_3297 |
| variant_4398 | KKKKFKKIPKFLKLAKKF | seqid_3298 |
| variant_4399 | RKKKFKKIPKFLKLAKKF | seqid_3299 |
| variant_4400 | FKKKFKKIPKFLKLAKKF | seqid_3300 |
| variant_4401 | KWKKFKKIPKFLKLAKKF | seqid_3301 |
| variant_4402 | RWKKFKKIPKFLKLAKKF | seqid_3302 |
| variant_4403 | FWKKFKKIPKFLKLAKKF | seqid_3303 |
| variant_4404 | KKKLLKKIPKFLKLAKKF | seqid_3304 |
| variant_4405 | RKKLLKKIPKFLKLAKKF | seqid_3305 |
| variant_4406 | FKKLLKKIPKFLKLAKKF | seqid_3306 |
| variant_4407 | KWKLLKKIPKFLKLAKKF | seqid_3307 |
| variant_4408 | RWKLLKKIPKFLKLAKKF | seqid_3308 |
| variant_4409 | FWKLLKKIPKFLKLAKKF | seqid_3309 |
| variant_4410 | KKKKLKKIPKFLKLAKKF | seqid_3310 |
| variant_4411 | RKKKLKKIPKFLKLAKKF | seqid_3311 |
| variant_4412 | FKKKLKKIPKFLKLAKKF | seqid_3312 |
| variant_4413 | KWKKLKKIPKFLKLAKKF | seqid_3313 |
| variant_4414 | RWKKLKKIPKFLKLAKKF | seqid_3314 |
| variant_4415 | FWKKLKKIPKFLKLAKKF | seqid_3315 |
| variant_4416 | KKKLFLKIPPPKFKKLAKKF | seqid_3316 |
| variant_4417 | RKKLFLKIPPPKFKKLAKKF | seqid_3317 |
| variant_4418 | FKKLFLKIPPPKFKKLAKKF | seqid_3318 |
| variant_4419 | KWKLFLKIPPPKFKKLAKKF | seqid_3319 |
| variant_4420 | RWKLFLKIPPPKFKKLAKKF | seqid_3320 |
| variant_4421 | FWKLFLKIPPPKFKKLAKKF | seqid_3321 |
| variant_4422 | KKKKFLKIPPPKFKKLAKKF | seqid_3322 |
| variant_4423 | RKKKFLKIPPPKFKKLAKKF | seqid_3323 |
| variant_4424 | FKKKFLKIPPPKFKKLAKKF | seqid_3324 |
| variant_4425 | KWKKFLKIPPPKFKKLAKKF | seqid_3325 |
| variant_4426 | RWKKFLKIPPPKFKKLAKKF | seqid_3326 |
| variant_4427 | FWKKFLKIPPPKFKKLAKKF | seqid_3327 |
| variant_4428 | KKKLLLKIPPPKFKKLAKKF | seqid_3328 |
| variant_4429 | RKKLLLKIPPPKFKKLAKKF | seqid_3329 |
| variant_4430 | FKKLLLKIPPPKFKKLAKKF | seqid_3330 |
| variant_4431 | KWKLLLKIPPPKFKKLAKKF | seqid_3331 |
| variant_4432 | RWKLLLKIPPPKFKKLAKKF | seqid_3332 |
| variant_4433 | FWKLLLKIPPPKFKKLAKKF | seqid_3333 |
| variant_4434 | KKKKLLKIPPPKFKKLAKKF | seqid_3334 |
| variant_4435 | RKKKLLKIPPPKFKKLAKKF | seqid_3335 |
| variant_4436 | FKKKLLKIPPPKFKKLAKKF | seqid_3336 |
| variant_4437 | KWKKLLKIPPPKFKKLAKKF | seqid_3337 |
| variant_4438 | RWKKLLKIPPPKFKKLAKKF | seqid_3338 |
| variant_4439 | FWKKLLKIPPPKFKKLAKKF | seqid_3339 |
| variant_4440 | KKKLFKKIPPPKFKKLAKKF | seqid_3340 |
| variant_4441 | RKKLFKKIPPPKFKKLAKKF | seqid_3341 |
| variant_4442 | FKKLFKKIPPPKFKKLAKKF | seqid_3342 |
| variant_4443 | KWKLFKKIPPPKFKKLAKKF | seqid_3343 |
| variant_4444 | RWKLFKKIPPPKFKKLAKKF | seqid_3344 |
| variant_4445 | FWKLFKKIPPPKFKKLAKKF | seqid_3345 |
| variant_4446 | KKKKFKKIPPPKFKKLAKKF | seqid_3346 |
| variant_4447 | RKKKFKKIPPPKFKKLAKKF | seqid_3347 |
| variant_4448 | FKKKFKKIPPPKFKKLAKKF | seqid_3348 |
| variant_4449 | KWKKFKKIPPPKFKKLAKKF | seqid_3349 |
| variant_4450 | RWKKFKKIPPPKFKKLAKKF | seqid_3350 |
| variant_4451 | FWKKFKKIPPPKFKKLAKKF | seqid_3351 |
| variant_4452 | KKKLLKKIPPPKFKKLAKKF | seqid_3352 |
| variant_4453 | RKKLLKKIPPPKFKKLAKKF | seqid_3353 |
| variant_4454 | FKKLLKKIPPPKFKKLAKKF | seqid_3354 |
| variant_4455 | KWKLLKKIPPPKFKKLAKKF | seqid_3355 |
| variant_4456 | RWKLLKKIPPPKFKKLAKKF | seqid_3356 |
| variant_4457 | FWKLLKKIPPPKFKKLAKKF | seqid_3357 |
| variant_4458 | KKKKLKKIPPPKFKKLAKKF | seqid_3358 |
| variant_4459 | RKKKLKKIPPPKFKKLAKKF | seqid_3359 |
| variant_4460 | FKKKLKKIPPPKFKKLAKKF | seqid_3360 |
| variant_4461 | KWKKLKKIPPPKFKKLAKKF | seqid_3361 |
| variant_4462 | RWKKLKKIPPPKFKKLAKKF | seqid_3362 |
| variant_4463 | FWKKLKKIPPPKFKKLAKKF | seqid_3363 |
| variant_4464 | KKKLFLKIPPKFKKLAKKF | seqid_3364 |
| variant_4465 | RKKLFLKIPPKFKKLAKKF | seqid_3365 |
| variant_4466 | FKKLFLKIPPKFKKLAKKF | seqid_3366 |
| variant_4467 | KWKLFLKIPPKFKKLAKKF | seqid_3367 |
| variant_4468 | RWKLFLKIPPKFKKLAKKF | seqid_3368 |
| variant_4469 | FWKLFLKIPPKFKKLAKKF | seqid_3369 |
| variant_4470 | KKKKFLKIPPKFKKLAKKF | seqid_3370 |
| variant_4471 | RKKKFLKIPPKFKKLAKKF | seqid_3371 |
| variant_4472 | FKKKFLKIPPKFKKLAKKF | seqid_3372 |
| variant_4473 | KWKKFLKIPPKFKKLAKKF | seqid_3373 |
| variant_4474 | RWKKFLKIPPKFKKLAKKF | seqid_3374 |
| variant_4475 | FWKKFLKIPPKFKKLAKKF | seqid_3375 |
| variant_4476 | KKKLLLKIPPKFKKLAKKF | seqid_3376 |
| variant_4477 | RKKLLLKIPPKFKKLAKKF | seqid_3377 |
| variant_4478 | FKKLLLKIPPKFKKLAKKF | seqid_3378 |
| variant_4479 | KWKLLLKIPPKFKKLAKKF | seqid_3379 |
| variant_4480 | RWKLLLKIPPKFKKLAKKF | seqid_3380 |
| variant_4481 | FWKLLLKIPPKFKKLAKKF | seqid_3381 |
| variant_4482 | KKKKLLKIPPKFKKLAKKF | seqid_3382 |
| variant_4483 | RKKKLLKIPPKFKKLAKKF | seqid_3383 |
| variant_4484 | FKKKLLKIPPKFKKLAKKF | seqid_3384 |
| variant_4485 | KWKKLLKIPPKFKKLAKKF | seqid_3385 |
| variant_4486 | RWKKLLKIPPKFKKLAKKF | seqid_3386 |
| variant_4487 | FWKKLLKIPPKFKKLAKKF | seqid_3387 |
| variant_4488 | KKKLFKKIPPKFKKLAKKF | seqid_3388 |
| variant_4489 | RKKLFKKIPPKFKKLAKKF | seqid_3389 |
| variant_4490 | FKKLFKKIPPKFKKLAKKF | seqid_3390 |
| variant_4491 | KWKLFKKIPPKFKKLAKKF | seqid_3391 |
| variant_4492 | RWKLFKKIPPKFKKLAKKF | seqid_3392 |
| variant_4493 | FWKLFKKIPPKFKKLAKKF | seqid_3393 |
| variant_4494 | KKKKFKKIPPKFKKLAKKF | seqid_3394 |
| variant_4495 | RKKKFKKIPPKFKKLAKKF | seqid_3395 |
| variant_4496 | FKKKFKKIPPKFKKLAKKF | seqid_3396 |
| variant_4497 | KWKKFKKIPPKFKKLAKKF | seqid_3397 |
| variant_4498 | RWKKFKKIPPKFKKLAKKF | seqid_3398 |
| variant_4499 | FWKKFKKIPPKFKKLAKKF | seqid_3399 |
| variant_4500 | KKKLLKKIPPKFKKLAKKF | seqid_3400 |
| variant_4501 | RKKLLKKIPPKFKKLAKKF | seqid_3401 |
| variant_4502 | FKKLLKKIPPKFKKLAKKF | seqid_3402 |
| variant_4503 | KWKLLKKIPPKFKKLAKKF | seqid_3403 |
| variant_4504 | RWKLLKKIPPKFKKLAKKF | seqid_3404 |
| variant_4505 | FWKLLKKIPPKFKKLAKKF | seqid_3405 |
| variant_4506 | KKKKLKKIPPKFKKLAKKF | seqid_3406 |
| variant_4507 | RKKKLKKIPPKFKKLAKKF | seqid_3407 |
| variant_4508 | FKKKLKKIPPKFKKLAKKF | seqid_3408 |
| variant_4509 | KWKKLKKIPPKFKKLAKKF | seqid_3409 |
| variant_4510 | RWKKLKKIPPKFKKLAKKF | seqid_3410 |
| variant_4511 | FWKKLKKIPPKFKKLAKKF | seqid_3411 |
| variant_4560 | KKKLFLKIPKFKKLAKKF | seqid_3412 |
| variant_4561 | RKKLFLKIPKFKKLAKKF | seqid_3413 |
| variant_4562 | FKKLFLKIPKFKKLAKKF | seqid_3414 |
| variant_4563 | KWKLFLKIPKFKKLAKKF | seqid_3415 |
| variant_4564 | RWKLFLKIPKFKKLAKKF | seqid_3416 |
| variant_4565 | FWKLFLKIPKFKKLAKKF | seqid_3417 |
| variant_4566 | KKKKFLKIPKFKKLAKKF | seqid_3418 |
| variant_4567 | RKKKFLKIPKFKKLAKKF | seqid_3419 |
| variant_4568 | FKKKFLKIPKFKKLAKKF | seqid_3420 |
| variant_4569 | KWKKFLKIPKFKKLAKKF | seqid_3421 |
| variant_4570 | RWKKFLKIPKFKKLAKKF | seqid_3422 |
| variant_4571 | FWKKFLKIPKFKKLAKKF | seqid_3423 |
| variant_4572 | KKKLLLKIPKFKKLAKKF | seqid_3424 |
| variant_4573 | RKKLLLKIPKFKKLAKKF | seqid_3425 |
| variant_4574 | FKKLLLKIPKFKKLAKKF | seqid_3426 |
| variant_4575 | KWKLLLKIPKFKKLAKKF | seqid_3427 |
| variant_4576 | RWKLLLKIPKFKKLAKKF | seqid_3428 |
| variant_4577 | FWKLLLKIPKFKKLAKKF | seqid_3429 |
| variant_4578 | KKKKLLKIPKFKKLAKKF | seqid_3430 |
| variant_4579 | RKKKLLKIPKFKKLAKKF | seqid_3431 |
| variant_4580 | FKKKLLKIPKFKKLAKKF | seqid_3432 |
| variant_4581 | KWKKLLKIPKFKKLAKKF | seqid_3433 |
| variant_4582 | RWKKLLKIPKFKKLAKKF | seqid_3434 |
| variant_4583 | FWKKLLKIPKFKKLAKKF | seqid_3435 |
| variant_4584 | KKKLFKKIPKFKKLAKKF | seqid_3436 |
| variant_4585 | RKKLFKKIPKFKKLAKKF | seqid_3437 |
| variant_4586 | FKKLFKKIPKFKKLAKKF | seqid_3438 |
| variant_4587 | KWKLFKKIPKFKKLAKKF | seqid_3439 |
| variant_4588 | RWKLFKKIPKFKKLAKKF | seqid_3440 |
| variant_4589 | FWKLFKKIPKFKKLAKKF | seqid_3441 |
| variant_4590 | KKKKFKKIPKFKKLAKKF | seqid_3442 |
| variant_4591 | RKKKFKKIPKFKKLAKKF | seqid_3443 |
| variant_4592 | FKKKFKKIPKFKKLAKKF | seqid_3444 |
| variant_4593 | KWKKFKKIPKFKKLAKKF | seqid_3445 |
| variant_4594 | RWKKFKKIPKFKKLAKKF | seqid_3446 |
| variant_4595 | FWKKFKKIPKFKKLAKKF | seqid_3447 |
| variant_4596 | KKKLLKKIPKFKKLAKKF | seqid_3448 |
| variant_4597 | RKKLLKKIPKFKKLAKKF | seqid_3449 |
| variant_4598 | FKKLLKKIPKFKKLAKKF | seqid_3450 |
| variant_4599 | KWKLLKKIPKFKKLAKKF | seqid_3451 |
| variant_4600 | RWKLLKKIPKFKKLAKKF | seqid_3452 |
| variant_4601 | FWKLLKKIPKFKKLAKKF | seqid_3453 |
| variant_4602 | KKKKLKKIPKFKKLAKKF | seqid_3454 |
| variant_4603 | RKKKLKKIPKFKKLAKKF | seqid_3455 |
| variant_4604 | FKKKLKKIPKFKKLAKKF | seqid_3456 |
| variant_4605 | KWKKLKKIPKFKKLAKKF | seqid_3457 |
| variant_4606 | RWKKLKKIPKFKKLAKKF | seqid_3458 |
| variant_4607 | FWKKLKKIPKFKKLAKKF | seqid_3459 |
| variant_4608 | KKKLFLKIPPPKFLHVAKKF | seqid_3460 |
| variant_4609 | RKKLFLKIPPPKFLHVAKKF | seqid_3461 |
| variant_4610 | FKKLFLKIPPPKFLHVAKKF | seqid_3462 |
| variant_4611 | KWKLFLKIPPPKFLHVAKKF | seqid_3463 |
| variant_4612 | RWKLFLKIPPPKFLHVAKKF | seqid_3464 |
| variant_4613 | FWKLFLKIPPPKFLHVAKKF | seqid_3465 |
| variant_4614 | KKKKFLKIPPPKFLHVAKKF | seqid_3466 |
| variant_4615 | RKKKFLKIPPPKFLHVAKKF | seqid_3467 |
| variant_4616 | FKKKFLKIPPPKFLHVAKKF | seqid_3468 |
| variant_4617 | KWKKFLKIPPPKFLHVAKKF | seqid_3469 |
| variant_4618 | RWKKFLKIPPPKFLHVAKKF | seqid_3470 |
| variant_4619 | FWKKFLKIPPPKFLHVAKKF | seqid_3471 |
| variant_4620 | KKKLLLKIPPPKFLHVAKKF | seqid_3472 |
| variant_4621 | RKKLLLKIPPPKFLHVAKKF | seqid_3473 |
| variant_4622 | FKKLLLKIPPPKFLHVAKKF | seqid_3474 |
| variant_4623 | KWKLLLKIPPPKFLHVAKKF | seqid_3475 |
| variant_4624 | RWKLLLKIPPPKFLHVAKKF | seqid_3476 |
| variant_4625 | FWKLLLKIPPPKFLHVAKKF | seqid_3477 |
| variant_4626 | KKKKLLKIPPPKFLHVAKKF | seqid_3478 |
| variant_4627 | RKKKLLKIPPPKFLHVAKKF | seqid_3479 |
| variant_4628 | FKKKLLKIPPPKFLHVAKKF | seqid_3480 |
| variant_4629 | KWKKLLKIPPPKFLHVAKKF | seqid_3481 |
| variant_4630 | RWKKLLKIPPPKFLHVAKKF | seqid_3482 |
| variant_4631 | FWKKLLKIPPPKFLHVAKKF | seqid_3483 |
| variant_4632 | KKKLFKKIPPPKFLHVAKKF | seqid_3484 |
| variant_4633 | RKKLFKKIPPPKFLHVAKKF | seqid_3485 |
| variant_4634 | FKKLFKKIPPPKFLHVAKKF | seqid_3486 |
| variant_4635 | KWKLFKKIPPPKFLHVAKKF | seqid_3487 |
| variant_4636 | RWKLFKKIPPPKFLHVAKKF | seqid_3488 |
| variant_4637 | FWKLFKKIPPPKFLHVAKKF | seqid_3489 |
| variant_4638 | KKKKFKKIPPPKFLHVAKKF | seqid_3490 |
| variant_4639 | RKKKFKKIPPPKFLHVAKKF | seqid_3491 |
| variant_4640 | FKKKFKKIPPPKFLHVAKKF | seqid_3492 |
| variant_4641 | KWKKFKKIPPPKFLHVAKKF | seqid_3493 |
| variant_4642 | RWKKFKKIPPPKFLHVAKKF | seqid_3494 |
| variant_4643 | FWKKFKKIPPPKFLHVAKKF | seqid_3495 |
| variant_4644 | KKKLLKKIPPPKFLHVAKKF | seqid_3496 |
| variant_4645 | RKKLLKKIPPPKFLHVAKKF | seqid_3497 |
| variant_4646 | FKKLLKKIPPPKFLHVAKKF | seqid_3498 |
| variant_4647 | KWKLLKKIPPPKFLHVAKKF | seqid_3499 |
| variant_4648 | RWKLLKKIPPPKFLHVAKKF | seqid_3500 |
| variant_4649 | FWKLLKKIPPPKFLHVAKKF | seqid_3501 |
| variant_4650 | KKKKLKKIPPPKFLHVAKKF | seqid_3502 |
| variant_4651 | RKKKLKKIPPPKFLHVAKKF | seqid_3503 |
| variant_4652 | FKKKLKKIPPPKFLHVAKKF | seqid_3504 |
| variant_4653 | KWKKLKKIPPPKFLHVAKKF | seqid_3505 |
| variant_4654 | RWKKLKKIPPPKFLHVAKKF | seqid_3506 |
| variant_4655 | FWKKLKKIPPPKFLHVAKKF | seqid_3507 |
| variant_4656 | KKKLFLKIPPKFLHVAKKF | seqid_3508 |
| variant_4657 | RKKLFLKIPPKFLHVAKKF | seqid_3509 |
| variant_4658 | FKKLFLKIPPKFLHVAKKF | seqid_3510 |
| variant_4659 | KWKLFLKIPPKFLHVAKKF | seqid_3511 |
| variant_4660 | RWKLFLKIPPKFLHVAKKF | seqid_3512 |
| variant_4661 | FWKLFLKIPPKFLHVAKKF | seqid_3513 |
| variant_4662 | KKKKFLKIPPKFLHVAKKF | seqid_3514 |
| variant_4663 | RKKKFLKIPPKFLHVAKKF | seqid_3515 |
| variant_4664 | FKKKFLKIPPKFLHVAKKF | seqid_3516 |
| variant_4665 | KWKKFLKIPPKFLHVAKKF | seqid_3517 |
| variant_4666 | RWKKFLKIPPKFLHVAKKF | seqid_3518 |
| variant_4667 | FWKKFLKIPPKFLHVAKKF | seqid_3519 |
| variant_4668 | KKKLLLKIPPKFLHVAKKF | seqid_3520 |
| variant_4669 | RKKLLLKIPPKFLHVAKKF | seqid_3521 |
| variant_4670 | FKKLLLKIPPKFLHVAKKF | seqid_3522 |
| variant_4671 | KWKLLLKIPPKFLHVAKKF | seqid_3523 |
| variant_4672 | RWKLLLKIPPKFLHVAKKF | seqid_3524 |
| variant_4673 | FWKLLLKIPPKFLHVAKKF | seqid_3525 |
| variant_4674 | KKKKLLKIPPKFLHVAKKF | seqid_3526 |
| variant_4675 | RKKKLLKIPPKFLHVAKKF | seqid_3527 |
| variant_4676 | FKKKLLKIPPKFLHVAKKF | seqid_3528 |
| variant_4677 | KWKKLLKIPPKFLHVAKKF | seqid_3529 |
| variant_4678 | RWKKLLKIPPKFLHVAKKF | seqid_3530 |
| variant_4679 | FWKKLLKIPPKFLHVAKKF | seqid_3531 |
| variant_4680 | KKKLFKKIPPKFLHVAKKF | seqid_3532 |
| variant_4681 | RKKLFKKIPPKFLHVAKKF | seqid_3533 |
| variant_4682 | FKKLFKKIPPKFLHVAKKF | seqid_3534 |
| variant_4683 | KWKLFKKIPPKFLHVAKKF | seqid_3535 |
| variant_4684 | RWKLFKKIPPKFLHVAKKF | seqid_3536 |
| variant_4685 | FWKLFKKIPPKFLHVAKKF | seqid_3537 |
| variant_4686 | KKKKFKKIPPKFLHVAKKF | seqid_3538 |
| variant_4687 | RKKKFKKIPPKFLHVAKKF | seqid_3539 |
| variant_4688 | FKKKFKKIPPKFLHVAKKF | seqid_3540 |
| variant_4689 | KWKKFKKIPPKFLHVAKKF | seqid_3541 |
| variant_4690 | RWKKFKKIPPKFLHVAKKF | seqid_3542 |
| variant_4691 | FWKKFKKIPPKFLHVAKKF | seqid_3543 |
| variant_4692 | KKKLLKKIPPKFLHVAKKF | seqid_3544 |
| variant_4693 | RKKLLKKIPPKFLHVAKKF | seqid_3545 |
| variant_4694 | FKKLLKKIPPKFLHVAKKF | seqid_3546 |
| variant_4695 | KWKLLKKIPPKFLHVAKKF | seqid_3547 |
| variant_4696 | RWKLLKKIPPKFLHVAKKF | seqid_3548 |
| variant_4697 | FWKLLKKIPPKFLHVAKKF | seqid_3549 |
| variant_4698 | KKKKLKKIPPKFLHVAKKF | seqid_3550 |
| variant_4699 | RKKKLKKIPPKFLHVAKKF | seqid_3551 |
| variant_4700 | FKKKLKKIPPKFLHVAKKF | seqid_3552 |
| variant_4701 | KWKKLKKIPPKFLHVAKKF | seqid_3553 |
| variant_4702 | RWKKLKKIPPKFLHVAKKF | seqid_3554 |
| variant_4703 | FWKKLKKIPPKFLHVAKKF | seqid_3555 |
| variant_4752 | KKKLFLKIPKFLHVAKKF | seqid_3556 |
| variant_4753 | RKKLFLKIPKFLHVAKKF | seqid_3557 |
| variant_4754 | FKKLFLKIPKFLHVAKKF | seqid_3558 |
| variant_4755 | KWKLFLKIPKFLHVAKKF | seqid_3559 |
| variant_4756 | RWKLFLKIPKFLHVAKKF | seqid_3560 |
| variant_4757 | FWKLFLKIPKFLHVAKKF | seqid_3561 |
| variant_4758 | KKKKFLKIPKFLHVAKKF | seqid_3562 |
| variant_4759 | RKKKFLKIPKFLHVAKKF | seqid_3563 |
| variant_4760 | FKKKFLKIPKFLHVAKKF | seqid_3564 |
| variant_4761 | KWKKFLKIPKFLHVAKKF | seqid_3565 |
| variant_4762 | RWKKFLKIPKFLHVAKKF | seqid_3566 |
| variant_4763 | FWKKFLKIPKFLHVAKKF | seqid_3567 |
| variant_4764 | KKKLLLKIPKFLHVAKKF | seqid_3568 |
| variant_4765 | RKKLLLKIPKFLHVAKKF | seqid_3569 |
| variant_4766 | FKKLLLKIPKFLHVAKKF | seqid_3570 |
| variant_4767 | KWKLLLKIPKFLHVAKKF | seqid_3571 |
| variant_4768 | RWKLLLKIPKFLHVAKKF | seqid_3572 |
| variant_4769 | FWKLLLKIPKFLHVAKKF | seqid_3573 |
| variant_4770 | KKKKLLKIPKFLHVAKKF | seqid_3574 |
| variant_4771 | RKKKLLKIPKFLHVAKKF | seqid_3575 |
| variant_4772 | FKKKLLKIPKFLHVAKKF | seqid_3576 |
| variant_4773 | KWKKLLKIPKFLHVAKKF | seqid_3577 |
| variant_4774 | RWKKLLKIPKFLHVAKKF | seqid_3578 |
| variant_4775 | FWKKLLKIPKFLHVAKKF | seqid_3579 |
| variant_4776 | KKKLFKKIPKFLHVAKKF | seqid_3580 |
| variant_4777 | RKKLFKKIPKFLHVAKKF | seqid_3581 |
| variant_4778 | FKKLFKKIPKFLHVAKKF | seqid_3582 |
| variant_4779 | KWKLFKKIPKFLHVAKKF | seqid_3583 |
| variant_4780 | RWKLFKKIPKFLHVAKKF | seqid_3584 |
| variant_4781 | FWKLFKKIPKFLHVAKKF | seqid_3585 |
| variant_4782 | KKKKFKKIPKFLHVAKKF | seqid_3586 |
| variant_4783 | RKKKFKKIPKFLHVAKKF | seqid_3587 |
| variant_4784 | FKKKFKKIPKFLHVAKKF | seqid_3588 |
| variant_4785 | KWKKFKKIPKFLHVAKKF | seqid_3589 |
| variant_4786 | RWKKFKKIPKFLHVAKKF | seqid_3590 |
| variant_4787 | FWKKFKKIPKFLHVAKKF | seqid_3591 |
| variant_4788 | KKKLLKKIPKFLHVAKKF | seqid_3592 |
| variant_4789 | RKKLLKKIPKFLHVAKKF | seqid_3593 |
| variant_4790 | FKKLLKKIPKFLHVAKKF | seqid_3594 |
| variant_4791 | KWKLLKKIPKFLHVAKKF | seqid_3595 |
| variant_4792 | RWKLLKKIPKFLHVAKKF | seqid_3596 |
| variant_4793 | FWKLLKKIPKFLHVAKKF | seqid_3597 |
| variant_4794 | KKKKLKKIPKFLHVAKKF | seqid_3598 |
| variant_4795 | RKKKLKKIPKFLHVAKKF | seqid_3599 |
| variant_4796 | FKKKLKKIPKFLHVAKKF | seqid_3600 |
| variant_4797 | KWKKLKKIPKFLHVAKKF | seqid_3601 |
| variant_4798 | RWKKLKKIPKFLHVAKKF | seqid_3602 |
| variant_4799 | FWKKLKKIPKFLHVAKKF | seqid_3603 |
| variant_4800 | KKKLFLKIPPPKFKHVAKKF | seqid_3604 |
| variant_4801 | RKKLFLKIPPPKFKHVAKKF | seqid_3605 |
| variant_4802 | FKKLFLKIPPPKFKHVAKKF | seqid_3606 |
| variant_4803 | KWKLFLKIPPPKFKHVAKKF | seqid_3607 |
| variant_4804 | RWKLFLKIPPPKFKHVAKKF | seqid_3608 |
| variant_4805 | FWKLFLKIPPPKFKHVAKKF | seqid_3609 |
| variant_4806 | KKKKFLKIPPPKFKHVAKKF | seqid_3610 |
| variant_4807 | RKKKFLKIPPPKFKHVAKKF | seqid_3611 |
| variant_4808 | FKKKFLKIPPPKFKHVAKKF | seqid_3612 |
| variant_4809 | KWKKFLKIPPPKFKHVAKKF | seqid_3613 |
| variant_4810 | RWKKFLKIPPPKFKHVAKKF | seqid_3614 |
| variant_4811 | FWKKFLKIPPPKFKHVAKKF | seqid_3615 |
| variant_4812 | KKKLLLKIPPPKFKHVAKKF | seqid_3616 |
| variant_4813 | RKKLLLKIPPPKFKHVAKKF | seqid_3617 |
| variant_4814 | FKKLLLKIPPPKFKHVAKKF | seqid_3618 |
| variant_4815 | KWKLLLKIPPPKFKHVAKKF | seqid_3619 |
| variant_4816 | RWKLLLKIPPPKFKHVAKKF | seqid_3620 |
| variant_4817 | FWKLLLKIPPPKFKHVAKKF | seqid_3621 |
| variant_4818 | KKKKLLKIPPPKFKHVAKKF | seqid_3622 |
| variant_4819 | RKKKLLKIPPPKFKHVAKKF | seqid_3623 |
| variant_4820 | FKKKLLKIPPPKFKHVAKKF | seqid_3624 |
| variant_4821 | KWKKLLKIPPPKFKHVAKKF | seqid_3625 |
| variant_4822 | RWKKLLKIPPPKFKHVAKKF | seqid_3626 |
| variant_4823 | FWKKLLKIPPPKFKHVAKKF | seqid_3627 |
| variant_4824 | KKKLFKKIPPPKFKHVAKKF | seqid_3628 |
| variant_4825 | RKKLFKKIPPPKFKHVAKKF | seqid_3629 |
| variant_4826 | FKKLFKKIPPPKFKHVAKKF | seqid_3630 |
| variant_4827 | KWKLFKKIPPPKFKHVAKKF | seqid_3631 |
| variant_4828 | RWKLFKKIPPPKFKHVAKKF | seqid_3632 |
| variant_4829 | FWKLFKKIPPPKFKHVAKKF | seqid_3633 |
| variant_4830 | KKKKFKKIPPPKFKHVAKKF | seqid_3634 |
| variant_4831 | RKKKFKKIPPPKFKHVAKKF | seqid_3635 |
| variant_4832 | FKKKFKKIPPPKFKHVAKKF | seqid_3636 |
| variant_4833 | KWKKFKKIPPPKFKHVAKKF | seqid_3637 |
| variant_4834 | RWKKFKKIPPPKFKHVAKKF | seqid_3638 |
| variant_4835 | FWKKFKKIPPPKFKHVAKKF | seqid_3639 |
| variant_4836 | KKKLLKKIPPPKFKHVAKKF | seqid_3640 |
| variant_4837 | RKKLLKKIPPPKFKHVAKKF | seqid_3641 |
| variant_4838 | FKKLLKKIPPPKFKHVAKKF | seqid_3642 |
| variant_4839 | KWKLLKKIPPPKFKHVAKKF | seqid_3643 |
| variant_4840 | RWKLLKKIPPPKFKHVAKKF | seqid_3644 |
| variant_4841 | FWKLLKKIPPPKFKHVAKKF | seqid_3645 |
| variant_4842 | KKKKLKKIPPPKFKHVAKKF | seqid_3646 |
| variant_4843 | RKKKLKKIPPPKFKHVAKKF | seqid_3647 |
| variant_4844 | FKKKLKKIPPPKFKHVAKKF | seqid_3648 |
| variant_4845 | KWKKLKKIPPPKFKHVAKKF | seqid_3649 |
| variant_4846 | RWKKLKKIPPPKFKHVAKKF | seqid_3650 |
| variant_4847 | FWKKLKKIPPPKFKHVAKKF | seqid_3651 |
| variant_4848 | KKKLFLKIPPKFKHVAKKF | seqid_3652 |
| variant_4849 | RKKLFLKIPPKFKHVAKKF | seqid_3653 |
| variant_4850 | FKKLFLKIPPKFKHVAKKF | seqid_3654 |
| variant_4851 | KWKLFLKIPPKFKHVAKKF | seqid_3655 |
| variant_4852 | RWKLFLKIPPKFKHVAKKF | seqid_3656 |
| variant_4853 | FWKLFLKIPPKFKHVAKKF | seqid_3657 |
| variant_4854 | KKKKFLKIPPKFKHVAKKF | seqid_3658 |
| variant_4855 | RKKKFLKIPPKFKHVAKKF | seqid_3659 |
| variant_4856 | FKKKFLKIPPKFKHVAKKF | seqid_3660 |
| variant_4857 | KWKKFLKIPPKFKHVAKKF | seqid_3661 |
| variant_4858 | RWKKFLKIPPKFKHVAKKF | seqid_3662 |
| variant_4859 | FWKKFLKIPPKFKHVAKKF | seqid_3663 |
| variant_4860 | KKKLLLKIPPKFKHVAKKF | seqid_3664 |
| variant_4861 | RKKLLLKIPPKFKHVAKKF | seqid_3665 |
| variant_4862 | FKKLLLKIPPKFKHVAKKF | seqid_3666 |
| variant_4863 | KWKLLLKIPPKFKHVAKKF | seqid_3667 |
| variant_4864 | RWKLLLKIPPKFKHVAKKF | seqid_3668 |
| variant_4865 | FWKLLLKIPPKFKHVAKKF | seqid_3669 |
| variant_4866 | KKKKLLKIPPKFKHVAKKF | seqid_3670 |
| variant_4867 | RKKKLLKIPPKFKHVAKKF | seqid_3671 |
| variant_4868 | FKKKLLKIPPKFKHVAKKF | seqid_3672 |
| variant_4869 | KWKKLLKIPPKFKHVAKKF | seqid_3673 |
| variant_4870 | RWKKLLKIPPKFKHVAKKF | seqid_3674 |
| variant_4871 | FWKKLLKIPPKFKHVAKKF | seqid_3675 |
| variant_4872 | KKKLFKKIPPKFKHVAKKF | seqid_3676 |
| variant_4873 | RKKLFKKIPPKFKHVAKKF | seqid_3677 |
| variant_4874 | FKKLFKKIPPKFKHVAKKF | seqid_3678 |
| variant_4875 | KWKLFKKIPPKFKHVAKKF | seqid_3679 |
| variant_4876 | RWKLFKKIPPKFKHVAKKF | seqid_3680 |
| variant_4877 | FWKLFKKIPPKFKHVAKKF | seqid_3681 |
| variant_4878 | KKKKFKKIPPKFKHVAKKF | seqid_3682 |
| variant_4879 | RKKKFKKIPPKFKHVAKKF | seqid_3683 |
| variant_4880 | FKKKFKKIPPKFKHVAKKF | seqid_3684 |
| variant_4881 | KWKKFKKIPPKFKHVAKKF | seqid_3685 |
| variant_4882 | RWKKFKKIPPKFKHVAKKF | seqid_3686 |
| variant_4883 | FWKKFKKIPPKFKHVAKKF | seqid_3687 |
| variant_4884 | KKKLLKKIPPKFKHVAKKF | seqid_3688 |
| variant_4885 | RKKLLKKIPPKFKHVAKKF | seqid_3689 |
| variant_4886 | FKKLLKKIPPKFKHVAKKF | seqid_3690 |
| variant_4887 | KWKLLKKIPPKFKHVAKKF | seqid_3691 |
| variant_4888 | RWKLLKKIPPKFKHVAKKF | seqid_3692 |
| variant_4889 | FWKLLKKIPPKFKHVAKKF | seqid_3693 |
| variant_4890 | KKKKLKKIPPKFKHVAKKF | seqid_3694 |
| variant_4891 | RKKKLKKIPPKFKHVAKKF | seqid_3695 |
| variant_4892 | FKKKLKKIPPKFKHVAKKF | seqid_3696 |
| variant_4893 | KWKKLKKIPPKFKHVAKKF | seqid_3697 |
| variant_4894 | RWKKLKKIPPKFKHVAKKF | seqid_3698 |
| variant_4895 | FWKKLKKIPPKFKHVAKKF | seqid_3699 |
| variant_4944 | KKKLFLKIPKFKHVAKKF | seqid_3700 |
| variant_4945 | RKKLFLKIPKFKHVAKKF | seqid_3701 |
| variant_4946 | FKKLFLKIPKFKHVAKKF | seqid_3702 |
| variant_4947 | KWKLFLKIPKFKHVAKKF | seqid_3703 |
| variant_4948 | RWKLFLKIPKFKHVAKKF | seqid_3704 |
| variant_4949 | FWKLFLKIPKFKHVAKKF | seqid_3705 |
| variant_4950 | KKKKFLKIPKFKHVAKKF | seqid_3706 |
| variant_4951 | RKKKFLKIPKFKHVAKKF | seqid_3707 |
| variant_4952 | FKKKFLKIPKFKHVAKKF | seqid_3708 |
| variant_4953 | KWKKFLKIPKFKHVAKKF | seqid_3709 |
| variant_4954 | RWKKFLKIPKFKHVAKKF | seqid_3710 |
| variant_4955 | FWKKFLKIPKFKHVAKKF | seqid_3711 |
| variant_4956 | KKKLLLKIPKFKHVAKKF | seqid_3712 |
| variant_4957 | RKKLLLKIPKFKHVAKKF | seqid_3713 |
| variant_4958 | FKKLLLKIPKFKHVAKKF | seqid_3714 |
| variant_4959 | KWKLLLKIPKFKHVAKKF | seqid_3715 |
| variant_4960 | RWKLLLKIPKFKHVAKKF | seqid_3716 |
| variant_4961 | FWKLLLKIPKFKHVAKKF | seqid_3717 |
| variant_4962 | KKKKLLKIPKFKHVAKKF | seqid_3718 |
| variant_4963 | RKKKLLKIPKFKHVAKKF | seqid_3719 |
| variant_4964 | FKKKLLKIPKFKHVAKKF | seqid_3720 |
| variant_4965 | KWKKLLKIPKFKHVAKKF | seqid_3721 |
| variant_4966 | RWKKLLKIPKFKHVAKKF | seqid_3722 |
| variant_4967 | FWKKLLKIPKFKHVAKKF | seqid_3723 |
| variant_4968 | KKKLFKKIPKFKHVAKKF | seqid_3724 |
| variant_4969 | RKKLFKKIPKFKHVAKKF | seqid_3725 |
| variant_4970 | FKKLFKKIPKFKHVAKKF | seqid_3726 |
| variant_4971 | KWKLFKKIPKFKHVAKKF | seqid_3727 |
| variant_4972 | RWKLFKKIPKFKHVAKKF | seqid_3728 |
| variant_4973 | FWKLFKKIPKFKHVAKKF | seqid_3729 |
| variant_4974 | KKKKFKKIPKFKHVAKKF | seqid_3730 |
| variant_4975 | RKKKFKKIPKFKHVAKKF | seqid_3731 |
| variant_4976 | FKKKFKKIPKFKHVAKKF | seqid_3732 |
| variant_4977 | KWKKFKKIPKFKHVAKKF | seqid_3733 |
| variant_4978 | RWKKFKKIPKFKHVAKKF | seqid_3734 |
| variant_4979 | FWKKFKKIPKFKHVAKKF | seqid_3735 |
| variant_4980 | KKKLLKKIPKFKHVAKKF | seqid_3736 |
| variant_4981 | RKKLLKKIPKFKHVAKKF | seqid_3737 |
| variant_4982 | FKKLLKKIPKFKHVAKKF | seqid_3738 |
| variant_4983 | KWKLLKKIPKFKHVAKKF | seqid_3739 |
| variant_4984 | RWKLLKKIPKFKHVAKKF | seqid_3740 |
| variant_4985 | FWKLLKKIPKFKHVAKKF | seqid_3741 |
| variant_4986 | KKKKLKKIPKFKHVAKKF | seqid_3742 |
| variant_4987 | RKKKLKKIPKFKHVAKKF | seqid_3743 |
| variant_4988 | FKKKLKKIPKFKHVAKKF | seqid_3744 |
| variant_4989 | KWKKLKKIPKFKHVAKKF | seqid_3745 |
| variant_4990 | RWKKLKKIPKFKHVAKKF | seqid_3746 |
| variant_4991 | FWKKLKKIPKFKHVAKKF | seqid_3747 |
| variant_4992 | KKKLFLKIPPPKFLKVAKKF | seqid_3748 |
| variant_4993 | RKKLFLKIPPPKFLKVAKKF | seqid_3749 |
| variant_4994 | FKKLFLKIPPPKFLKVAKKF | seqid_3750 |
| variant_4995 | KWKLFLKIPPPKFLKVAKKF | seqid_3751 |
| variant_4996 | RWKLFLKIPPPKFLKVAKKF | seqid_3752 |
| variant_4997 | FWKLFLKIPPPKFLKVAKKF | seqid_3753 |
| variant_4998 | KKKKFLKIPPPKFLKVAKKF | seqid_3754 |
| variant_4999 | RKKKFLKIPPPKFLKVAKKF | seqid_3755 |
| variant_5000 | FKKKFLKIPPPKFLKVAKKF | seqid_3756 |
| variant_5001 | KWKKFLKIPPPKFLKVAKKF | seqid_3757 |
| variant_5002 | RWKKFLKIPPPKFLKVAKKF | seqid_3758 |
| variant_5003 | FWKKFLKIPPPKFLKVAKKF | seqid_3759 |
| variant_5004 | KKKLLLKIPPPKFLKVAKKF | seqid_3760 |
| variant_5005 | RKKLLLKIPPPKFLKVAKKF | seqid_3761 |
| variant_5006 | FKKLLLKIPPPKFLKVAKKF | seqid_3762 |
| variant_5007 | KWKLLLKIPPPKFLKVAKKF | seqid_3763 |
| variant_5008 | RWKLLLKIPPPKFLKVAKKF | seqid_3764 |
| variant_5009 | FWKLLLKIPPPKFLKVAKKF | seqid_3765 |
| variant_5010 | KKKKLLKIPPPKFLKVAKKF | seqid_3766 |
| variant_5011 | RKKKLLKIPPPKFLKVAKKF | seqid_3767 |
| variant_5012 | FKKKLLKIPPPKFLKVAKKF | seqid_3768 |
| variant_5013 | KWKKLLKIPPPKFLKVAKKF | seqid_3769 |
| variant_5014 | RWKKLLKIPPPKFLKVAKKF | seqid_3770 |
| variant_5015 | FWKKLLKIPPPKFLKVAKKF | seqid_3771 |
| variant_5016 | KKKLFKKIPPPKFLKVAKKF | seqid_3772 |
| variant_5017 | RKKLFKKIPPPKFLKVAKKF | seqid_3773 |
| variant_5018 | FKKLFKKIPPPKFLKVAKKF | seqid_3774 |
| variant_5019 | KWKLFKKIPPPKFLKVAKKF | seqid_3775 |
| variant_5020 | RWKLFKKIPPPKFLKVAKKF | seqid_3776 |
| variant_5021 | FWKLFKKIPPPKFLKVAKKF | seqid_3777 |
| variant_5022 | KKKKFKKIPPPKFLKVAKKF | seqid_3778 |
| variant_5023 | RKKKFKKIPPPKFLKVAKKF | seqid_3779 |
| variant_5024 | FKKKFKKIPPPKFLKVAKKF | seqid_3780 |
| variant_5025 | KWKKFKKIPPPKFLKVAKKF | seqid_3781 |
| variant_5026 | RWKKFKKIPPPKFLKVAKKF | seqid_3782 |
| variant_5027 | FWKKFKKIPPPKFLKVAKKF | seqid_3783 |
| variant_5028 | KKKLLKKIPPPKFLKVAKKF | seqid_3784 |
| variant_5029 | RKKLLKKIPPPKFLKVAKKF | seqid_3785 |
| variant_5030 | FKKLLKKIPPPKFLKVAKKF | seqid_3786 |
| variant_5031 | KWKLLKKIPPPKFLKVAKKF | seqid_3787 |
| variant_5032 | RWKLLKKIPPPKFLKVAKKF | seqid_3788 |
| variant_5033 | FWKLLKKIPPPKFLKVAKKF | seqid_3789 |
| variant_5034 | KKKKLKKIPPPKFLKVAKKF | seqid_3790 |
| variant_5035 | RKKKLKKIPPPKFLKVAKKF | seqid_3791 |
| variant_5036 | FKKKLKKIPPPKFLKVAKKF | seqid_3792 |
| variant_5037 | KWKKLKKIPPPKFLKVAKKF | seqid_3793 |
| variant_5038 | RWKKLKKIPPPKFLKVAKKF | seqid_3794 |
| variant_5039 | FWKKLKKIPPPKFLKVAKKF | seqid_3795 |
| variant_5040 | KKKLFLKIPPKFLKVAKKF | seqid_3796 |
| variant_5041 | RKKLFLKIPPKFLKVAKKF | seqid_3797 |
| variant_5042 | FKKLFLKIPPKFLKVAKKF | seqid_3798 |
| variant_5043 | KWKLFLKIPPKFLKVAKKF | seqid_3799 |
| variant_5044 | RWKLFLKIPPKFLKVAKKF | seqid_3800 |
| variant_5045 | FWKLFLKIPPKFLKVAKKF | seqid_3801 |
| variant_5046 | KKKKFLKIPPKFLKVAKKF | seqid_3802 |
| variant_5047 | RKKKFLKIPPKFLKVAKKF | seqid_3803 |
| variant_5048 | FKKKFLKIPPKFLKVAKKF | seqid_3804 |
| variant_5049 | KWKKFLKIPPKFLKVAKKF | seqid_3805 |
| variant_5050 | RWKKFLKIPPKFLKVAKKF | seqid_3806 |
| variant_5051 | FWKKFLKIPPKFLKVAKKF | seqid_3807 |
| variant_5052 | KKKLLLKIPPKFLKVAKKF | seqid_3808 |
| variant_5053 | RKKLLLKIPPKFLKVAKKF | seqid_3809 |
| variant_5054 | FKKLLLKIPPKFLKVAKKF | seqid_3810 |
| variant_5055 | KWKLLLKIPPKFLKVAKKF | seqid_3811 |
| variant_5056 | RWKLLLKIPPKFLKVAKKF | seqid_3812 |
| variant_5057 | FWKLLLKIPPKFLKVAKKF | seqid_3813 |
| variant_5058 | KKKKLLKIPPKFLKVAKKF | seqid_3814 |
| variant_5059 | RKKKLLKIPPKFLKVAKKF | seqid_3815 |
| variant_5060 | FKKKLLKIPPKFLKVAKKF | seqid_3816 |
| variant_5061 | KWKKLLKIPPKFLKVAKKF | seqid_3817 |
| variant_5062 | RWKKLLKIPPKFLKVAKKF | seqid_3818 |
| variant_5063 | FWKKLLKIPPKFLKVAKKF | seqid_3819 |
| variant_5064 | KKKLFKKIPPKFLKVAKKF | seqid_3820 |
| variant_5065 | RKKLFKKIPPKFLKVAKKF | seqid_3821 |
| variant_5066 | FKKLFKKIPPKFLKVAKKF | seqid_3822 |
| variant_5067 | KWKLFKKIPPKFLKVAKKF | seqid_3823 |
| variant_5068 | RWKLFKKIPPKFLKVAKKF | seqid_3824 |
| variant_5069 | FWKLFKKIPPKFLKVAKKF | seqid_3825 |
| variant_5070 | KKKKFKKIPPKFLKVAKKF | seqid_3826 |
| variant_5071 | RKKKFKKIPPKFLKVAKKF | seqid_3827 |
| variant_5072 | FKKKFKKIPPKFLKVAKKF | seqid_3828 |
| variant_5073 | KWKKFKKIPPKFLKVAKKF | seqid_3829 |
| variant_5074 | RWKKFKKIPPKFLKVAKKF | seqid_3830 |
| variant_5075 | FWKKFKKIPPKFLKVAKKF | seqid_3831 |
| variant_5076 | KKKLLKKIPPKFLKVAKKF | seqid_3832 |
| variant_5077 | RKKLLKKIPPKFLKVAKKF | seqid_3833 |
| variant_5078 | FKKLLKKIPPKFLKVAKKF | seqid_3834 |
| variant_5079 | KWKLLKKIPPKFLKVAKKF | seqid_3835 |
| variant_5080 | RWKLLKKIPPKFLKVAKKF | seqid_3836 |
| variant_5081 | FWKLLKKIPPKFLKVAKKF | seqid_3837 |
| variant_5082 | KKKKLKKIPPKFLKVAKKF | seqid_3838 |
| variant_5083 | RKKKLKKIPPKFLKVAKKF | seqid_3839 |
| variant_5084 | FKKKLKKIPPKFLKVAKKF | seqid_3840 |
| variant_5085 | KWKKLKKIPPKFLKVAKKF | seqid_3841 |
| variant_5086 | RWKKLKKIPPKFLKVAKKF | seqid_3842 |
| variant_5087 | FWKKLKKIPPKFLKVAKKF | seqid_3843 |
| variant_5136 | KKKLFLKIPKFLKVAKKF | seqid_3844 |
| variant_5137 | RKKLFLKIPKFLKVAKKF | seqid_3845 |
| variant_5138 | FKKLFLKIPKFLKVAKKF | seqid_3846 |
| variant_5139 | KWKLFLKIPKFLKVAKKF | seqid_3847 |
| variant_5140 | RWKLFLKIPKFLKVAKKF | seqid_3848 |
| variant_5141 | FWKLFLKIPKFLKVAKKF | seqid_3849 |
| variant_5142 | KKKKFLKIPKFLKVAKKF | seqid_3850 |
| variant_5143 | RKKKFLKIPKFLKVAKKF | seqid_3851 |
| variant_5144 | FKKKFLKIPKFLKVAKKF | seqid_3852 |
| variant_5145 | KWKKFLKIPKFLKVAKKF | seqid_3853 |
| variant_5146 | RWKKFLKIPKFLKVAKKF | seqid_3854 |
| variant_5147 | FWKKFLKIPKFLKVAKKF | seqid_3855 |
| variant_5148 | KKKLLLKIPKFLKVAKKF | seqid_3856 |
| variant_5149 | RKKLLLKIPKFLKVAKKF | seqid_3857 |
| variant_5150 | FKKLLLKIPKFLKVAKKF | seqid_3858 |
| variant_5151 | KWKLLLKIPKFLKVAKKF | seqid_3859 |
| variant_5152 | RWKLLLKIPKFLKVAKKF | seqid_3860 |
| variant_5153 | FWKLLLKIPKFLKVAKKF | seqid_3861 |
| variant_5154 | KKKKLLKIPKFLKVAKKF | seqid_3862 |
| variant_5155 | RKKKLLKIPKFLKVAKKF | seqid_3863 |
| variant_5156 | FKKKLLKIPKFLKVAKKF | seqid_3864 |
| variant_5157 | KWKKLLKIPKFLKVAKKF | seqid_3865 |
| variant_5158 | RWKKLLKIPKFLKVAKKF | seqid_3866 |
| variant_5159 | FWKKLLKIPKFLKVAKKF | seqid_3867 |
| variant_5160 | KKKLFKKIPKFLKVAKKF | seqid_3868 |
| variant_5161 | RKKLFKKIPKFLKVAKKF | seqid_3869 |
| variant_5162 | FKKLFKKIPKFLKVAKKF | seqid_3870 |
| variant_5163 | KWKLFKKIPKFLKVAKKF | seqid_3871 |
| variant_5164 | RWKLFKKIPKFLKVAKKF | seqid_3872 |
| variant_5165 | FWKLFKKIPKFLKVAKKF | seqid_3873 |
| variant_5166 | KKKKFKKIPKFLKVAKKF | seqid_3874 |
| variant_5167 | RKKKFKKIPKFLKVAKKF | seqid_3875 |
| variant_5168 | FKKKFKKIPKFLKVAKKF | seqid_3876 |
| variant_5169 | KWKKFKKIPKFLKVAKKF | seqid_3877 |
| variant_5170 | RWKKFKKIPKFLKVAKKF | seqid_3878 |
| variant_5171 | FWKKFKKIPKFLKVAKKF | seqid_3879 |
| variant_5172 | KKKLLKKIPKFLKVAKKF | seqid_3880 |
| variant_5173 | RKKLLKKIPKFLKVAKKF | seqid_3881 |
| variant_5174 | FKKLLKKIPKFLKVAKKF | seqid_3882 |
| variant_5175 | KWKLLKKIPKFLKVAKKF | seqid_3883 |
| variant_5176 | RWKLLKKIPKFLKVAKKF | seqid_3884 |
| variant_5177 | FWKLLKKIPKFLKVAKKF | seqid_3885 |
| variant_5178 | KKKKLKKIPKFLKVAKKF | seqid_3886 |
| variant_5179 | RKKKLKKIPKFLKVAKKF | seqid_3887 |
| variant_5180 | FKKKLKKIPKFLKVAKKF | seqid_3888 |
| variant_5181 | KWKKLKKIPKFLKVAKKF | seqid_3889 |
| variant_5182 | RWKKLKKIPKFLKVAKKF | seqid_3890 |
| variant_5183 | FWKKLKKIPKFLKVAKKF | seqid_3891 |
| variant_5184 | KKKLFLKIPPPKFKKVAKKF | seqid_3892 |
| variant_5185 | RKKLFLKIPPPKFKKVAKKF | seqid_3893 |
| variant_5186 | FKKLFLKIPPPKFKKVAKKF | seqid_3894 |
| variant_5187 | KWKLFLKIPPPKFKKVAKKF | seqid_3895 |
| variant_5188 | RWKLFLKIPPPKFKKVAKKF | seqid_3896 |
| variant_5189 | FWKLFLKIPPPKFKKVAKKF | seqid_3897 |
| variant_5190 | KKKKFLKIPPPKFKKVAKKF | seqid_3898 |
| variant_5191 | RKKKFLKIPPPKFKKVAKKF | seqid_3899 |
| variant_5192 | FKKKFLKIPPPKFKKVAKKF | seqid_3900 |
| variant_5193 | KWKKFLKIPPPKFKKVAKKF | seqid_3901 |
| variant_5194 | RWKKFLKIPPPKFKKVAKKF | seqid_3902 |
| variant_5195 | FWKKFLKIPPPKFKKVAKKF | seqid_3903 |
| variant_5196 | KKKLLLKIPPPKFKKVAKKF | seqid_3904 |
| variant_5197 | RKKLLLKIPPPKFKKVAKKF | seqid_3905 |
| variant_5198 | FKKLLLKIPPPKFKKVAKKF | seqid_3906 |
| variant_5199 | KWKLLLKIPPPKFKKVAKKF | seqid_3907 |
| variant_5200 | RWKLLLKIPPPKFKKVAKKF | seqid_3908 |
| variant_5201 | FWKLLLKIPPPKFKKVAKKF | seqid_3909 |
| variant_5202 | KKKKLLKIPPPKFKKVAKKF | seqid_3910 |
| variant_5203 | RKKKLLKIPPPKFKKVAKKF | seqid_3911 |
| variant_5204 | FKKKLLKIPPPKFKKVAKKF | seqid_3912 |
| variant_5205 | KWKKLLKIPPPKFKKVAKKF | seqid_3913 |
| variant_5206 | RWKKLLKIPPPKFKKVAKKF | seqid_3914 |
| variant_5207 | FWKKLLKIPPPKFKKVAKKF | seqid_3915 |
| variant_5208 | KKKLFKKIPPPKFKKVAKKF | seqid_3916 |
| variant_5209 | RKKLFKKIPPPKFKKVAKKF | seqid_3917 |
| variant_5210 | FKKLFKKIPPPKFKKVAKKF | seqid_3918 |
| variant_5211 | KWKLFKKIPPPKFKKVAKKF | seqid_3919 |
| variant_5212 | RWKLFKKIPPPKFKKVAKKF | seqid_3920 |
| variant_5213 | FWKLFKKIPPPKFKKVAKKF | seqid_3921 |
| variant_5214 | KKKKFKKIPPPKFKKVAKKF | seqid_3922 |
| variant_5215 | RKKKFKKIPPPKFKKVAKKF | seqid_3923 |
| variant_5216 | FKKKFKKIPPPKFKKVAKKF | seqid_3924 |
| variant_5217 | KWKKFKKIPPPKFKKVAKKF | seqid_3925 |
| variant_5218 | RWKKFKKIPPPKFKKVAKKF | seqid_3926 |
| variant_5219 | FWKKFKKIPPPKFKKVAKKF | seqid_3927 |
| variant_5220 | KKKLLKKIPPPKFKKVAKKF | seqid_3928 |
| variant_5221 | RKKLLKKIPPPKFKKVAKKF | seqid_3929 |
| variant_5222 | FKKLLKKIPPPKFKKVAKKF | seqid_3930 |
| variant_5223 | KWKLLKKIPPPKFKKVAKKF | seqid_3931 |
| variant_5224 | RWKLLKKIPPPKFKKVAKKF | seqid_3932 |
| variant_5225 | FWKLLKKIPPPKFKKVAKKF | seqid_3933 |
| variant_5226 | KKKKLKKIPPPKFKKVAKKF | seqid_3934 |
| variant_5227 | RKKKLKKIPPPKFKKVAKKF | seqid_3935 |
| variant_5228 | FKKKLKKIPPPKFKKVAKKF | seqid_3936 |
| variant_5229 | KWKKLKKIPPPKFKKVAKKF | seqid_3937 |
| variant_5230 | RWKKLKKIPPPKFKKVAKKF | seqid_3938 |
| variant_5231 | FWKKLKKIPPPKFKKVAKKF | seqid_3939 |
| variant_5232 | KKKLFLKIPPKFKKVAKKF | seqid_3940 |
| variant_5233 | RKKLFLKIPPKFKKVAKKF | seqid_3941 |
| variant_5234 | FKKLFLKIPPKFKKVAKKF | seqid_3942 |
| variant_5235 | KWKLFLKIPPKFKKVAKKF | seqid_3943 |
| variant_5236 | RWKLFLKIPPKFKKVAKKF | seqid_3944 |
| variant_5237 | FWKLFLKIPPKFKKVAKKF | seqid_3945 |
| variant_5238 | KKKKFLKIPPKFKKVAKKF | seqid_3946 |
| variant_5239 | RKKKFLKIPPKFKKVAKKF | seqid_3947 |
| variant_5240 | FKKKFLKIPPKFKKVAKKF | seqid_3948 |
| variant_5241 | KWKKFLKIPPKFKKVAKKF | seqid_3949 |
| variant_5242 | RWKKFLKIPPKFKKVAKKF | seqid_3950 |
| variant_5243 | FWKKFLKIPPKFKKVAKKF | seqid_3951 |
| variant_5244 | KKKLLLKIPPKFKKVAKKF | seqid_3952 |
| variant_5245 | RKKLLLKIPPKFKKVAKKF | seqid_3953 |
| variant_5246 | FKKLLLKIPPKFKKVAKKF | seqid_3954 |
| variant_5247 | KWKLLLKIPPKFKKVAKKF | seqid_3955 |
| variant_5248 | RWKLLLKIPPKFKKVAKKF | seqid_3956 |
| variant_5249 | FWKLLLKIPPKFKKVAKKF | seqid_3957 |
| variant_5250 | KKKKLLKIPPKFKKVAKKF | seqid_3958 |
| variant_5251 | RKKKLLKIPPKFKKVAKKF | seqid_3959 |
| variant_5252 | FKKKLLKIPPKFKKVAKKF | seqid_3960 |
| variant_5253 | KWKKLLKIPPKFKKVAKKF | seqid_3961 |
| variant_5254 | RWKKLLKIPPKFKKVAKKF | seqid_3962 |
| variant_5255 | FWKKLLKIPPKFKKVAKKF | seqid_3963 |
| variant_5256 | KKKLFKKIPPKFKKVAKKF | seqid_3964 |
| variant_5257 | RKKLFKKIPPKFKKVAKKF | seqid_3965 |
| variant_5258 | FKKLFKKIPPKFKKVAKKF | seqid_3966 |
| variant_5259 | KWKLFKKIPPKFKKVAKKF | seqid_3967 |
| variant_5260 | RWKLFKKIPPKFKKVAKKF | seqid_3968 |
| variant_5261 | FWKLFKKIPPKFKKVAKKF | seqid_3969 |
| variant_5262 | KKKKFKKIPPKFKKVAKKF | seqid_3970 |
| variant_5263 | RKKKFKKIPPKFKKVAKKF | seqid_3971 |
| variant_5264 | FKKKFKKIPPKFKKVAKKF | seqid_3972 |
| variant_5265 | KWKKFKKIPPKFKKVAKKF | seqid_3973 |
| variant_5266 | RWKKFKKIPPKFKKVAKKF | seqid_3974 |
| variant_5267 | FWKKFKKIPPKFKKVAKKF | seqid_3975 |
| variant_5268 | KKKLLKKIPPKFKKVAKKF | seqid_3976 |
| variant_5269 | RKKLLKKIPPKFKKVAKKF | seqid_3977 |
| variant_5270 | FKKLLKKIPPKFKKVAKKF | seqid_3978 |
| variant_5271 | KWKLLKKIPPKFKKVAKKF | seqid_3979 |
| variant_5272 | RWKLLKKIPPKFKKVAKKF | seqid_3980 |
| variant_5273 | FWKLLKKIPPKFKKVAKKF | seqid_3981 |
| variant_5274 | KKKKFKKIPPKFKKVAKKF | seqid_3982 |
| variant_5275 | RKKKLKKIPPKFKKVAKKF | seqid_3983 |
| variant_5276 | FKKKLKKIPPKFKKVAKKF | seqid_3984 |
| variant_5277 | KWKKLKKIPPKFKKVAKKF | seqid_3985 |
| variant_5278 | RWKKLKKIPPKFKKVAKKF | seqid_3986 |
| variant_5279 | FWKKLKKIPPKFKKVAKKF | seqid_3987 |
| variant_5328 | KKKLFLKIPKFKKVAKKF | seqid_3988 |
| variant_5329 | RKKLFLKIPKFKKVAKKF | seqid_3989 |
| variant_5330 | FKKLFLKIPKFKKVAKKF | seqid_3990 |
| variant_5331 | KWKLFLKIPKFKKVAKKF | seqid_3991 |
| variant_5332 | RWKLFLKIPKFKKVAKKF | seqid_3992 |
| variant_5333 | FWKLFLKIPKFKKVAKKF | seqid_3993 |
| variant_5334 | KKKKFLKIPKFKKVAKKF | seqid_3994 |
| variant_5335 | RKKKFLKIPKFKKVAKKF | seqid_3995 |
| variant_5336 | FKKKFLKIPKFKKVAKKF | seqid_3996 |
| variant_5337 | KWKKFLKIPKFKKVAKKF | seqid_3997 |
| variant_5338 | RWKKFLKIPKFKKVAKKF | seqid_3998 |
| variant_5339 | FWKKFLKIPKFKKVAKKF | seqid_3999 |
| variant_5340 | KKKLLLKIPKFKKVAKKF | seqid_4000 |
| variant_5341 | RKKLLLKIPKFKKVAKKF | seqid_4001 |
| variant_5342 | FKKLLLKIPKFKKVAKKF | seqid_4002 |
| variant_5343 | KWKLLLKIPKFKKVAKKF | seqid_4003 |
| variant_5344 | RWKLLLKIPKFKKVAKKF | seqid_4004 |
| variant_5345 | FWKLLLKIPKFKKVAKKF | seqid_4005 |
| variant_5346 | KKKKLLKIPKFKKVAKKF | seqid_4006 |
| variant_5347 | RKKKLLKIPKFKKVAKKF | seqid_4007 |
| variant_5348 | FKKKLLKIPKFKKVAKKF | seqid_4008 |
| variant_5349 | KWKKLLKIPKFKKVAKKF | seqid_4009 |
| variant_5350 | RWKKLLKIPKFKKVAKKF | seqid_4010 |
| variant_5351 | FWKKLLKIPKFKKVAKKF | seqid_4011 |
| variant_5352 | KKKLFKKIPKFKKVAKKF | seqid_4012 |
| variant_5353 | RKKLFKKIPKFKKVAKKF | seqid_4013 |
| variant_5354 | FKKLFKKIPKFKKVAKKF | seqid_4014 |
| variant_5355 | KWKLFKKIPKFKKVAKKF | seqid_4015 |
| variant_5356 | RWKLFKKIPKFKKVAKKF | seqid_4016 |
| variant_5357 | FWKLFKKIPKFKKVAKKF | seqid_4017 |
| variant_5358 | KKKKFKKIPKFKKVAKKF | seqid_4018 |
| variant_5359 | RKKKFKKIPKFKKVAKKF | seqid_4019 |
| variant_5360 | FKKKFKKIPKFKKVAKKF | seqid_4020 |
| variant_5361 | KWKKFKKIPKFKKVAKKF | seqid_4021 |
| variant_5362 | RWKKFKKIPKFKKVAKKF | seqid_4022 |
| variant_5363 | FWKKFKKIPKFKKVAKKF | seqid_4023 |
| variant_5364 | KKKLLKKIPKFKKVAKKF | seqid_4024 |
| variant_5365 | RKKLLKKIPKFKKVAKKF | seqid_4025 |
| variant_5366 | FKKLLKKIPKFKKVAKKF | seqid_4026 |
| variant_5367 | KWKLLKKIPKFKKVAKKF | seqid_4027 |
| variant_5368 | RWKLLKKIPKFKKVAKKF | seqid_4028 |
| variant_5369 | FWKLLKKIPKFKKVAKKF | seqid_4029 |
| variant_5370 | KKKKLKKIPKFKKVAKKF | seqid_4030 |
| variant_5371 | RKKKLKKIPKFKKVAKKF | seqid_4031 |
| variant_5372 | FKKKLKKIPKFKKVAKKF | seqid_4032 |
| variant_5373 | KWKKLKKIPKFKKVAKKF | seqid_4033 |
| variant_5374 | RWKKLKKIPKFKKVAKKF | seqid_4034 |
| variant_5375 | FWKKLKKIPKFKKVAKKF | seqid_4035 |
| variant_5376 | KKKLFLKIPPPKFLHSAKKF | seqid_4036 |
| variant_5377 | RKKLFLKIPPPKFLHSAKKF | seqid_4037 |
| variant_5378 | FKKLFLKIPPPKFLHSAKKF | seqid_4038 |
| variant_5379 | KWKLFLKIPPPKFLHSAKKF | seqid_4039 |
| variant_5380 | RWKLFLKIPPPKFLHSAKKF | seqid_4040 |
| variant_5381 | FWKLFLKIPPPKFLHSAKKF | seqid_4041 |
| variant_5382 | KKKKFLKIPPPKFLHSAKKF | seqid_4042 |
| variant_5383 | RKKKFLKIPPPKFLHSAKKF | seqid_4043 |
| variant_5384 | FKKKFLKIPPPKFLHSAKKF | seqid_4044 |
| variant_5385 | KWKKFLKIPPPKFLHSAKKF | seqid_4045 |
| variant_5386 | RWKKFLKIPPPKFLHSAKKF | seqid_4046 |
| variant_5387 | FWKKFLKIPPPKFLHSAKKF | seqid_4047 |
| variant_5388 | KKKLLLKIPPPKFLHSAKKF | seqid_4048 |
| variant_5389 | RKKLLLKIPPPKFLHSAKKF | seqid_4049 |
| variant_5390 | FKKLLLKIPPPKFLHSAKKF | seqid_4050 |
| variant_5391 | KWKLLLKIPPPKFLHSAKKF | seqid_4051 |
| variant_5392 | RWKLLLKIPPPKFLHSAKKF | seqid_4052 |
| variant_5393 | FWKLLLKIPPPKFLHSAKKF | seqid_4053 |
| variant_5394 | KKKKLLKIPPPKFLHSAKKF | seqid_4054 |
| variant_5395 | RKKKLLKIPPPKFLHSAKKF | seqid_4055 |
| variant_5396 | FKKKLLKIPPPKFLHSAKKF | seqid_4056 |
| variant_5397 | KWKKLLKIPPPKFLHSAKKF | seqid_4057 |
| variant_5398 | RWKKLLKIPPPKFLHSAKKF | seqid_4058 |
| variant_5399 | FWKKLLKIPPPKFLHSAKKF | seqid_4059 |
| variant_5400 | KKKLFKKIPPPKFLHSAKKF | seqid_4060 |
| variant_5401 | RKKLFKKIPPPKFLHSAKKF | seqid_4061 |
| variant_5402 | FKKLFKKIPPPKFLHSAKKF | seqid_4062 |
| variant_5403 | KWKLFKKIPPPKFLHSAKKF | seqid_4063 |
| variant_5404 | RWKLFKKIPPPKFLHSAKKF | seqid_4064 |
| variant_5405 | FWKLFKKIPPPKFLHSAKKF | seqid_4065 |
| variant_5406 | KKKKFKKIPPPKFLHSAKKF | seqid_4066 |
| variant_5407 | RKKKFKKIPPPKFLHSAKKF | seqid_4067 |
| variant_5408 | FKKKFKKIPPPKFLHSAKKF | seqid_4068 |
| variant_5409 | KWKKFKKIPPPKFLHSAKKF | seqid_4069 |
| variant_5410 | RWKKFKKIPPPKFLHSAKKF | seqid_4070 |
| variant_5411 | FWKKFKKIPPPKFLHSAKKF | seqid_4071 |
| variant_5412 | KKKLLKKIPPPKFLHSAKKF | seqid_4072 |
| variant_5413 | RKKLLKKIPPPKFLHSAKKF | seqid_4073 |
| variant_5414 | FKKLLKKIPPPKFLHSAKKF | seqid_4074 |
| variant_5415 | KWKLLKKIPPPKFLHSAKKF | seqid_4075 |
| variant_5416 | RWKLLKKIPPPKFLHSAKKF | seqid_4076 |
| variant_5417 | FWKLLKKIPPPKFLHSAKKF | seqid_4077 |
| variant_5418 | KKKKLKKIPPPKFLHSAKKF | seqid_4078 |
| variant_5419 | RKKKLKKIPPPKFLHSAKKF | seqid_4079 |
| variant_5420 | FKKKLKKIPPPKFLHSAKKF | seqid_4080 |
| variant_5421 | KWKKLKKIPPPKFLHSAKKF | seqid_4081 |
| variant_5422 | RWKKLKKIPPPKFLHSAKKF | seqid_4082 |
| variant_5423 | FWKKLKKIPPPKFLHSAKKF | seqid_4083 |
| variant_5424 | KKKLFLKIPPKFLHSAKKF | seqid_4084 |
| variant_5425 | RKKLFLKIPPKFLHSAKKF | seqid_4085 |
| variant_5426 | FKKLFLKIPPKFLHSAKKF | seqid_4086 |
| variant_5427 | KWKLFLKIPPKFLHSAKKF | seqid_4087 |
| variant_5428 | RWKLFLKIPPKFLHSAKKF | seqid_4088 |
| variant_5429 | FWKLFLKIPPKFLHSAKKF | seqid_4089 |
| variant_5430 | KKKKFLKIPPKFLHSAKKF | seqid_4090 |
| variant_5431 | RKKKFLKIPPKFLHSAKKF | seqid_4091 |
| variant_5432 | FKKKFLKIPPKFLHSAKKF | seqid_4092 |
| variant_5433 | KWKKFLKIPPKFLHSAKKF | seqid_4093 |
| variant_5434 | RWKKFLKIPPKFLHSAKKF | seqid_4094 |
| variant_5435 | FWKKFLKIPPKFLHSAKKF | seqid_4095 |
| variant_5436 | KKKLLLKIPPKFLHSAKKF | seqid_4096 |
| variant_5437 | RKKLLLKIPPKFLHSAKKF | seqid_4097 |
| variant_5438 | FKKLLLKIPPKFLHSAKKF | seqid_4098 |
| variant_5439 | KWKLLLKIPPKFLHSAKKF | seqid_4099 |
| variant_5440 | RWKLLLKIPPKFLHSAKKF | seqid_4100 |
| variant_5441 | FWKLLLKIPPKFLHSAKKF | seqid_4101 |
| variant_5442 | KKKKLLKIPPKFLHSAKKF | seqid_4102 |
| variant_5443 | RKKKLLKIPPKFLHSAKKF | seqid_4103 |
| variant_5444 | FKKKLLKIPPKFLHSAKKF | seqid_4104 |
| variant_5445 | KWKKLLKIPPKFLHSAKKF | seqid_4105 |
| variant_5446 | RWKKLLKIPPKFLHSAKKF | seqid_4106 |
| variant_5447 | FWKKLLKIPPKFLHSAKKF | seqid_4107 |
| variant_5448 | KKKLFKKIPPKFLHSAKKF | seqid_4108 |
| variant_5449 | RKKLFKKIPPKFLHSAKKF | seqid_4109 |
| variant_5450 | FKKLFKKIPPKFLHSAKKF | seqid_4110 |
| variant_5451 | KWKLFKKIPPKFLHSAKKF | seqid_4111 |
| variant_5452 | RWKLFKKIPPKFLHSAKKF | seqid_4112 |
| variant_5453 | FWKLFKKIPPKFLHSAKKF | seqid_4113 |
| variant_5454 | KKKKFKKIPPKFLHSAKKF | seqid_4114 |
| variant_5455 | RKKKFKKIPPKFLHSAKKF | seqid_4115 |
| variant_5456 | FKKKFKKIPPKFLHSAKKF | seqid_4116 |
| variant_5457 | KWKKFKKIPPKFLHSAKKF | seqid_4117 |
| variant_5458 | RWKKFKKIPPKFLHSAKKF | seqid_4118 |
| variant_5459 | FWKKFKKIPPKFLHSAKKF | seqid_4119 |
| variant_5460 | KKKLLKKIPPKFLHSAKKF | seqid_4120 |
| variant_5461 | RKKLLKKIPPKFLHSAKKF | seqid_4121 |
| variant_5462 | FKKLLKKIPPKFLHSAKKF | seqid_4122 |
| variant_5463 | KWKLLKKIPPKFLHSAKKF | seqid_4123 |
| variant_5464 | RWKLLKKIPPKFLHSAKKF | seqid_4124 |
| variant_5465 | FWKLLKKIPPKFLHSAKKF | seqid_4125 |
| variant_5466 | KKKKLKKIPPKFLHSAKKF | seqid_4126 |
| variant_5467 | RKKKLKKIPPKFLHSAKKF | seqid_4127 |
| variant_5468 | FKKKLKKIPPKFLHSAKKF | seqid_4128 |
| variant_5469 | KWKKLKKIPPKFLHSAKKF | seqid_4129 |
| variant_5470 | RWKKLKKIPPKFLHSAKKF | seqid_4130 |
| variant_5471 | FWKKLKKIPPKFLHSAKKF | seqid_4131 |
| variant_5520 | KKKLFLKIPKFLHSAKKF | seqid_4132 |
| variant_5521 | RKKLFLKIPKFLHSAKKF | seqid_4133 |
| variant_5522 | FKKLFLKIPKFLHSAKKF | seqid_4134 |
| variant_5523 | KWKLFLKIPKFLHSAKKF | seqid_4135 |
| variant_5524 | RWKLFLKIPKFLHSAKKF | seqid_4136 |
| variant_5525 | FWKLFLKIPKFLHSAKKF | seqid_4137 |
| variant_5526 | KKKKFLKIPKFLHSAKKF | seqid_4138 |
| variant_5527 | RKKKFLKIPKFLHSAKKF | seqid_4139 |
| variant_5528 | FKKKFLKIPKFLHSAKKF | seqid_4140 |
| variant_5529 | KWKKFLKIPKFLHSAKKF | seqid_4141 |
| variant_5530 | RWKKFLKIPKFLHSAKKF | seqid_4142 |
| variant_5531 | FWKKFLKIPKFLHSAKKF | seqid_4143 |
| variant_5532 | KKKLLLKIPKFLHSAKKF | seqid_4144 |
| variant_5533 | RKKLLLKIPKFLHSAKKF | seqid_4145 |
| variant_5534 | FKKLLLKIPKFLHSAKKF | seqid_4146 |
| variant_5535 | KWKLLLKIPKFLHSAKKF | seqid_4147 |
| variant_5536 | RWKLLLKIPKFLHSAKKF | seqid_4148 |
| variant_5537 | FWKLLLKIPKFLHSAKKF | seqid_4149 |
| variant_5538 | KKKKLLKIPKFLHSAKKF | seqid_4150 |
| variant_5539 | RKKKLLKIPKFLHSAKKF | seqid_4151 |
| variant_5540 | FKKKLLKIPKFLHSAKKF | seqid_4152 |
| variant_5541 | KWKKLLKIPKFLHSAKKF | seqid_4153 |
| variant_5542 | RWKKLLKIPKFLHSAKKF | seqid_4154 |
| variant_5543 | FWKKLLKIPKFLHSAKKF | seqid_4155 |
| variant_5544 | KKKLFKKIPKFLHSAKKF | seqid_4156 |
| variant_5545 | RKKLFKKIPKFLHSAKKF | seqid_4157 |
| variant_5546 | FKKLFKKIPKFLHSAKKF | seqid_4158 |
| variant_5547 | KWKLFKKIPKFLHSAKKF | seqid_4159 |
| variant_5548 | RWKLFKKIPKFLHSAKKF | seqid_4160 |
| variant_5549 | FWKLFKKIPKFLHSAKKF | seqid_4161 |
| variant_5550 | KKKKFKKIPKFLHSAKKF | seqid_4162 |
| variant_5551 | RKKKFKKIPKFLHSAKKF | seqid_4163 |
| variant_5552 | FKKKFKKIPKFLHSAKKF | seqid_4164 |
| variant_5553 | KWKKFKKIPKFLHSAKKF | seqid_4165 |
| variant_5554 | RWKKFKKIPKFLHSAKKF | seqid_4166 |
| variant_5555 | FWKKFKKIPKFLHSAKKF | seqid_4167 |
| variant_5556 | KKKLLKKIPKFLHSAKKF | seqid_4168 |
| variant_5557 | RKKLLKKIPKFLHSAKKF | seqid_4169 |
| variant_5558 | FKKLLKKIPKFLHSAKKF | seqid_4170 |
| variant_5559 | KWKLLKKIPKFLHSAKKF | seqid_4171 |
| variant_5560 | RWKLLKKIPKFLHSAKKF | seqid_4172 |
| variant_5561 | FWKLLKKIPKFLHSAKKF | seqid_4173 |
| variant_5562 | KKKKLKKIPKFLHSAKKF | seqid_4174 |
| variant_5563 | RKKKLKKIPKFLHSAKKF | seqid_4175 |
| variant_5564 | FKKKLKKIPKFLHSAKKF | seqid_4176 |
| variant_5565 | KWKKLKKIPKFLHSAKKF | seqid_4177 |
| variant_5566 | RWKKLKKIPKFLHSAKKF | seqid_4178 |
| variant_5567 | FWKKLKKIPKFLHSAKKF | seqid_4179 |
| variant_5568 | KKKLFLKIPPPKFKHSAKKF | seqid_4180 |
| variant_5569 | RKKLFLKIPPPKFKHSAKKF | seqid_4181 |
| variant_5570 | FKKLFLKIPPPKFKHSAKKF | seqid_4182 |
| variant_5571 | KWKLFLKIPPPKFKHSAKKF | seqid_4183 |
| variant_5572 | RWKLFLKIPPPKFKHSAKKF | seqid_4184 |
| variant_5573 | FWKLFLKIPPPKFKHSAKKF | seqid_4185 |
| variant_5574 | KKKKFLKIPPPKFKHSAKKF | seqid_4186 |
| variant_5575 | RKKKFLKIPPPKFKHSAKKF | seqid_4187 |
| variant_5576 | FKKKFLKIPPPKFKHSAKKF | seqid_4188 |
| variant_5577 | KWKKFLKIPPPKFKHSAKKF | seqid_4189 |
| variant_5578 | RWKKFLKIPPPKFKHSAKKF | seqid_4190 |
| variant_5579 | FWKKFLKIPPPKFKHSAKKF | seqid_4191 |
| variant_5580 | KKKLLLKIPPPKFKHSAKKF | seqid_4192 |
| variant_5581 | RKKLLLKIPPPKFKHSAKKF | seqid_4193 |
| variant_5582 | FKKLLLKIPPPKFKHSAKKF | seqid_4194 |
| variant_5583 | KWKLLLKIPPPKFKHSAKKF | seqid_4195 |
| variant_5584 | RWKLLLKIPPPKFKHSAKKF | seqid_4196 |
| variant_5585 | FWKLLLKIPPPKFKHSAKKF | seqid_4197 |
| variant_5586 | KKKKLLKIPPPKFKHSAKKF | seqid_4198 |
| variant_5587 | RKKKLLKIPPPKFKHSAKKF | seqid_4199 |
| variant_5588 | FKKKLLKIPPPKFKHSAKKF | seqid_4200 |
| variant_5589 | KWKKLLKIPPPKFKHSAKKF | seqid_4201 |
| variant_5590 | RWKKLLKIPPPKFKHSAKKF | seqid_4202 |
| variant_5591 | FWKKLLKIPPPKFKHSAKKF | seqid_4203 |
| variant_5592 | KKKLFKKIPPPKFKHSAKKF | seqid_4204 |
| variant_5593 | RKKLFKKIPPPKFKHSAKKF | seqid_4205 |
| variant_5594 | FKKLFKKIPPPKFKHSAKKF | seqid_4206 |
| variant_5595 | KWKLFKKIPPPKFKHSAKKF | seqid_4207 |
| variant_5596 | RWKLFKKIPPPKFKHSAKKF | seqid_4208 |
| variant_5597 | FWKLFKKIPPPKFKHSAKKF | seqid_4209 |
| variant_5598 | KKKKFKKIPPPKFKHSAKKF | seqid_4210 |
| variant_5599 | RKKKFKKIPPPKFKHSAKKF | seqid_4211 |
| variant_5600 | FKKKFKKIPPPKFKHSAKKF | seqid_4212 |
| variant_5601 | KWKKFKKIPPPKFKHSAKKF | seqid_4213 |
| variant_5602 | RWKKFKKIPPPKFKHSAKKF | seqid_4214 |
| variant_5603 | FWKKFKKIPPPKFKHSAKKF | seqid_4215 |
| variant_5604 | KKKLLKKIPPPKFKHSAKKF | seqid_4216 |
| variant_5605 | RKKLLKKIPPPKFKHSAKKF | seqid_4217 |
| variant_5606 | FKKLLKKIPPPKFKHSAKKF | seqid_4218 |
| variant_5607 | KWKLLKKIPPPKFKHSAKKF | seqid_4219 |
| variant_5608 | RWKLLKKIPPPKFKHSAKKF | seqid_4220 |
| variant_5609 | FWKLLKKIPPPKFKHSAKKF | seqid_4221 |
| variant_5610 | KKKKLKKIPPPKFKHSAKKF | seqid_4222 |
| variant_5611 | RKKKLKKIPPPKFKHSAKKF | seqid_4223 |
| variant_5612 | FKKKLKKIPPPKFKHSAKKF | seqid_4224 |
| variant_5613 | KWKKLKKIPPPKFKHSAKKF | seqid_4225 |
| variant_5614 | RWKKLKKIPPPKFKHSAKKF | seqid_4226 |
| variant_5615 | FWKKLKKIPPPKFKHSAKKF | seqid_4227 |
| variant_5616 | KKKLFLKIPPKFKHSAKKF | seqid_4228 |
| variant_5617 | RKKLFLKIPPKFKHSAKKF | seqid_4229 |
| variant_5618 | FKKLFLKIPPKFKHSAKKF | seqid_4230 |
| variant_5619 | KWKLFLKIPPKFKHSAKKF | seqid_4231 |
| variant_5620 | RWKLFLKIPPKFKHSAKKF | seqid_4232 |
| variant_5621 | FWKLFLKIPPKFKHSAKKF | seqid_4233 |
| variant_5622 | KKKKFLKIPPKFKHSAKKF | seqid_4234 |
| variant_5623 | RKKKFLKIPPKFKHSAKKF | seqid_4235 |
| variant_5624 | FKKKFLKIPPKFKHSAKKF | seqid_4236 |
| variant_5625 | KWKKFLKIPPKFKHSAKKF | seqid_4237 |
| variant_5626 | RWKKFLKIPPKFKHSAKKF | seqid_4238 |
| variant_5627 | FWKKFLKIPPKFKHSAKKF | seqid_4239 |
| variant_5628 | KKKLLLKIPPKFKHSAKKF | seqid_4240 |
| variant_5629 | RKKLLLKIPPKFKHSAKKF | seqid_4241 |
| variant_5630 | FKKLLLKIPPKFKHSAKKF | seqid_4242 |
| variant_5631 | KWKLLLKIPPKFKHSAKKF | seqid_4243 |
| variant_5632 | RWKLLLKIPPKFKHSAKKF | seqid_4244 |
| variant_5633 | FWKLLLKIPPKFKHSAKKF | seqid_4245 |
| variant_5634 | KKKKLLKIPPKFKHSAKKF | seqid_4246 |
| variant_5635 | RKKKLLKIPPKFKHSAKKF | seqid_4247 |
| variant_5636 | FKKKLLKIPPKFKHSAKKF | seqid_4248 |
| variant_5637 | KWKKLLKIPPKFKHSAKKF | seqid_4249 |
| variant_5638 | RWKKLLKIPPKFKHSAKKF | seqid_4250 |
| variant_5639 | FWKKLLKIPPKFKHSAKKF | seqid_4251 |
| variant_5640 | KKKLFKKIPPKFKHSAKKF | seqid_4252 |
| variant_5641 | RKKLFKKIPPKFKHSAKKF | seqid_4253 |
| variant_5642 | FKKLFKKIPPKFKHSAKKF | seqid_4254 |
| variant_5643 | KWKLFKKIPPKFKHSAKKF | seqid_4255 |
| variant_5644 | RWKLFKKIPPKFKHSAKKF | seqid_4256 |
| variant_5645 | FWKLFKKIPPKFKHSAKKF | seqid_4257 |
| variant_5646 | KKKKFKKIPPKFKHSAKKF | seqid_4258 |
| variant_5647 | RKKKFKKIPPKFKHSAKKF | seqid_4259 |
| variant_5648 | FKKKFKKIPPKFKHSAKKF | seqid_4260 |
| variant_5649 | KWKKFKKIPPKFKHSAKKF | seqid_4261 |
| variant_5650 | RWKKFKKIPPKFKHSAKKF | seqid_4262 |
| variant_5651 | FWKKFKKIPPKFKHSAKKF | seqid_4263 |
| variant_5652 | KKKLLKKIPPKFKHSAKKF | seqid_4264 |
| variant_5653 | RKKLLKKIPPKFKHSAKKF | seqid_4265 |
| variant_5654 | FKKLLKKIPPKFKHSAKKF | seqid_4266 |
| variant_5655 | KWKLLKKIPPKFKHSAKKF | seqid_4267 |
| variant_5656 | RWKLLKKIPPKFKHSAKKF | seqid_4268 |
| variant_5657 | FWKLLKKIPPKFKHSAKKF | seqid_4269 |
| variant_5658 | KKKKLKKIPPKFKHSAKKF | seqid_4270 |
| variant_5659 | RKKKLKKIPPKFKHSAKKF | seqid_4271 |
| variant_5660 | FKKKLKKIPPKFKHSAKKF | seqid_4272 |
| variant_5661 | KWKKLKKIPPKFKHSAKKF | seqid_4273 |
| variant_5662 | RWKKLKKIPPKFKHSAKKF | seqid_4274 |
| variant_5663 | FWKKLKKIPPKFKHSAKKF | seqid_4275 |
| variant_5712 | KKKLFLKIPKFKHSAKKF | seqid_4276 |
| variant_5713 | RKKLFLKIPKFKHSAKKF | seqid_4277 |
| variant_5714 | FKKLFLKIPKFKHSAKKF | seqid_4278 |
| variant_5715 | KWKLFLKIPKFKHSAKKF | seqid_4279 |
| variant_5716 | RWKLFLKIPKFKHSAKKF | seqid_4280 |
| variant_5717 | FWKLFLKIPKFKHSAKKF | seqid_4281 |
| variant_5718 | KKKKFLKIPKFKHSAKKF | seqid_4282 |
| variant_5719 | RKKKFLKIPKFKHSAKKF | seqid_4283 |
| variant_5720 | FKKKFLKIPKFKHSAKKF | seqid_4284 |
| variant_5721 | KWKKFLKIPKFKHSAKKF | seqid_4285 |
| variant_5722 | RWKKFLKIPKFKHSAKKF | seqid_4286 |
| variant_5723 | FWKKFLKIPKFKHSAKKF | seqid_4287 |
| variant_5724 | KKKLLLKIPKFKHSAKKF | seqid_4288 |
| variant_5725 | RKKLLLKIPKFKHSAKKF | seqid_4289 |
| variant_5726 | FKKLLLKIPKFKHSAKKF | seqid_4290 |
| variant_5727 | KWKLLLKIPKFKHSAKKF | seqid_4291 |
| variant_5728 | RWKLLLKIPKFKHSAKKF | seqid_4292 |
| variant_5729 | FWKLLLKIPKFKHSAKKF | seqid_4293 |
| variant_5730 | KKKKLLKIPKFKHSAKKF | seqid_4294 |
| variant_5731 | RKKKLLKIPKFKHSAKKF | seqid_4295 |
| variant_5732 | FKKKLLKIPKFKHSAKKF | seqid_4296 |
| variant_5733 | KWKKLLKIPKFKHSAKKF | seqid_4297 |
| variant_5734 | RWKKLLKIPKFKHSAKKF | seqid_4298 |
| variant_5735 | FWKKLLKIPKFKHSAKKF | seqid_4299 |
| variant_5736 | KKKLFKKIPKFKHSAKKF | seqid_4300 |
| variant_5737 | RKKLFKKIPKFKHSAKKF | seqid_4301 |
| variant_5738 | FKKLFKKIPKFKHSAKKF | seqid_4302 |
| variant_5739 | KWKLFKKIPKFKHSAKKF | seqid_4303 |
| variant_5740 | RWKLFKKIPKFKHSAKKF | seqid_4304 |
| variant_5741 | FWKLFKKIPKFKHSAKKF | seqid_4305 |
| variant_5742 | KKKKFKKIPKFKHSAKKF | seqid_4306 |
| variant_5743 | RKKKFKKIPKFKHSAKKF | seqid_4307 |
| variant_5744 | FKKKFKKIPKFKHSAKKF | seqid_4308 |
| variant_5745 | KWKKFKKIPKFKHSAKKF | seqid_4309 |
| variant_5746 | RWKKFKKIPKFKHSAKKF | seqid_4310 |
| variant_5747 | FWKKFKKIPKFKHSAKKF | seqid_4311 |
| variant_5748 | KKKLLKKIPKFKHSAKKF | seqid_4312 |
| variant_5749 | RKKLLKKIPKFKHSAKKF | seqid_4313 |
| variant_5750 | FKKLLKKIPKFKHSAKKF | seqid_4314 |
| variant_5751 | KWKLLKKIPKFKHSAKKF | seqid_4315 |
| variant_5752 | RWKLLKKIPKFKHSAKKF | seqid_4316 |
| variant_5753 | FWKLLKKIPKFKHSAKKF | seqid_4317 |
| variant_5754 | KKKKLKKIPKFKHSAKKF | seqid_4318 |
| variant_5755 | RKKKLKKIPKFKHSAKKF | seqid_4319 |
| variant_5756 | FKKKLKKIPKFKHSAKKF | seqid_4320 |
| variant_5757 | KWKKLKKIPKFKHSAKKF | seqid_4321 |
| variant_5758 | RWKKLKKIPKFKHSAKKF | seqid_4322 |
| variant_5759 | FWKKLKKIPKFKHSAKKF | seqid_4323 |
| variant_5760 | KKKLFLKIPPPKFLKSAKKF | seqid_4324 |
| variant_5761 | RKKLFLKIPPPKFLKSAKKF | seqid_4325 |
| variant_5762 | FKKLFLKIPPPKFLKSAKKF | seqid_4326 |
| variant_5763 | KWKLFLKIPPPKFLKSAKKF | seqid_4327 |
| variant_5764 | RWKLFLKIPPPKFLKSAKKF | seqid_4328 |
| variant_5765 | FWKLFLKIPPPKFLKSAKKF | seqid_4329 |
| variant_5766 | KKKKFLKIPPPKFLKSAKKF | seqid_4330 |
| variant_5767 | RKKKFLKIPPPKFLKSAKKF | seqid_4331 |
| variant_5768 | FKKKFLKIPPPKFLKSAKKF | seqid_4332 |
| variant_5769 | KWKKFLKIPPPKFLKSAKKF | seqid_4333 |
| variant_5770 | RWKKFLKIPPPKFLKSAKKF | seqid_4334 |
| variant_5771 | FWKKFLKIPPPKFLKSAKKF | seqid_4335 |
| variant_5772 | KKKLLLKIPPPKFLKSAKKF | seqid_4336 |
| variant_5773 | RKKLLLKIPPPKFLKSAKKF | seqid_4337 |
| variant_5774 | FKKLLLKIPPPKFLKSAKKF | seqid_4338 |
| variant_5775 | KWKLLLKIPPPKFLKSAKKF | seqid_4339 |
| variant_5776 | RWKLLLKIPPPKFLKSAKKF | seqid_4340 |
| variant_5777 | FWKLLLKIPPPKFLKSAKKF | seqid_4341 |
| variant_5778 | KKKKLLKIPPPKFLKSAKKF | seqid_4342 |
| variant_5779 | RKKKLLKIPPPKFLKSAKKF | seqid_4343 |
| variant_5780 | FKKKLLKIPPPKFLKSAKKF | seqid_4344 |
| variant_5781 | KWKKLLKIPPPKFLKSAKKF | seqid_4345 |
| variant_5782 | RWKKLLKIPPPKFLKSAKKF | seqid_4346 |
| variant_5783 | FWKKLLKIPPPKFLKSAKKF | seqid_4347 |
| variant_5784 | KKKLFKKIPPPKFLKSAKKF | seqid_4348 |
| variant_5785 | RKKLFKKIPPPKFLKSAKKF | seqid_4349 |
| variant_5786 | FKKLFKKIPPPKFLKSAKKF | seqid_4350 |
| variant_5787 | KWKLFKKIPPPKFLKSAKKF | seqid_4351 |
| variant_5788 | RWKLFKKIPPPKFLKSAKKF | seqid_4352 |
| variant_5789 | FWKLFKKIPPPKFLKSAKKF | seqid_4353 |
| variant_5790 | KKKKFKKIPPPKFLKSAKKF | seqid_4354 |
| variant_5791 | RKKKFKKIPPPKFLKSAKKF | seqid_4355 |
| variant_5792 | FKKKFKKIPPPKFLKSAKKF | seqid_4356 |
| variant_5793 | KWKKFKKIPPPKFLKSAKKF | seqid_4357 |
| variant_5794 | RWKKFKKIPPPKFLKSAKKF | seqid_4358 |
| variant_5795 | FWKKFKKIPPPKFLKSAKKF | seqid_4359 |
| variant_5796 | KKKLLKKIPPPKFLKSAKKF | seqid_4360 |
| variant_5797 | RKKLLKKIPPPKFLKSAKKF | seqid_4361 |
| variant_5798 | FKKLLKKIPPPKFLKSAKKF | seqid_4362 |
| variant_5799 | KWKLLKKIPPPKFLKSAKKF | seqid_4363 |
| variant_5800 | RWKLLKKIPPPKFLKSAKKF | seqid_4364 |
| variant_5801 | FWKLLKKIPPPKFLKSAKKF | seqid_4365 |
| variant_5802 | KKKKLKKIPPPKFLKSAKKF | seqid_4366 |
| variant_5803 | RKKKLKKIPPPKFLKSAKKF | seqid_4367 |
| variant_5804 | FKKKLKKIPPPKFLKSAKKF | seqid_4368 |
| variant_5805 | KWKKLKKIPPPKFLKSAKKF | seqid_4369 |
| variant_5806 | RWKKLKKIPPPKFLKSAKKF | seqid_4370 |
| variant_5807 | FWKKLKKIPPPKFLKSAKKF | seqid_4371 |
| variant_5808 | KKKLFLKIPPKFLKSAKKF | seqid_4372 |
| variant_5809 | RKKLFLKIPPKFLKSAKKF | seqid_4373 |
| variant_5810 | FKKLFLKIPPKFLKSAKKF | seqid_4374 |
| variant_5811 | KWKLFLKIPPKFLKSAKKF | seqid_4375 |
| variant_5812 | RWKLFLKIPPKFLKSAKKF | seqid_4376 |
| variant_5813 | FWKLFLKIPPKFLKSAKKF | seqid_4377 |
| variant_5814 | KKKKFLKIPPKFLKSAKKF | seqid_4378 |
| variant_5815 | RKKKFLKIPPKFLKSAKKF | seqid_4379 |
| variant_5816 | FKKKFLKIPPKFLKSAKKF | seqid_4380 |
| variant_5817 | KWKKFLKIPPKFLKSAKKF | seqid_4381 |
| variant_5818 | RWKKFLKIPPKFLKSAKKF | seqid_4382 |
| variant_5819 | FWKKFLKIPPKFLKSAKKF | seqid_4383 |
| variant_5820 | KKKLLLKIPPKFLKSAKKF | seqid_4384 |
| variant_5821 | RKKLLLKIPPKFLKSAKKF | seqid_4385 |
| variant_5822 | FKKLLLKIPPKFLKSAKKF | seqid_4386 |
| variant_5823 | KWKLLLKIPPKFLKSAKKF | seqid_4387 |
| variant_5824 | RWKLLLKIPPKFLKSAKKF | seqid_4388 |
| variant_5825 | FWKLLLKIPPKFLKSAKKF | seqid_4389 |
| variant_5826 | KKKKLLKIPPKFLKSAKKF | seqid_4390 |
| variant_5827 | RKKKLLKIPPKFLKSAKKF | seqid_4391 |
| variant_5828 | FKKKLLKIPPKFLKSAKKF | seqid_4392 |
| variant_5829 | KWKKLLKIPPKFLKSAKKF | seqid_4393 |
| variant_5830 | RWKKLLKIPPKFLKSAKKF | seqid_4394 |
| variant_5831 | FWKKLLKIPPKFLKSAKKF | seqid_4395 |
| variant_5832 | KKKLFKKIPPKFLKSAKKF | seqid_4396 |
| variant_5833 | RKKLFKKIPPKFLKSAKKF | seqid_4397 |
| variant_5834 | FKKLFKKIPPKFLKSAKKF | seqid_4398 |
| variant_5835 | KWKLFKKIPPKFLKSAKKF | seqid_4399 |
| variant_5836 | RWKLFKKIPPKFLKSAKKF | seqid_4400 |
| variant_5837 | FWKLFKKIPPKFLKSAKKF | seqid_4401 |
| variant_5838 | KKKKFKKIPPKFLKSAKKF | seqid_4402 |
| variant_5839 | RKKKFKKIPPKFLKSAKKF | seqid_4403 |
| variant_5840 | FKKKFKKIPPKFLKSAKKF | seqid_4404 |
| variant_5841 | KWKKFKKIPPKFLKSAKKF | seqid_4405 |
| variant_5842 | RWKKFKKIPPKFLKSAKKF | seqid_4406 |
| variant_5843 | FWKKFKKIPPKFLKSAKKF | seqid_4407 |
| variant_5844 | KKKLLKKIPPKFLKSAKKF | seqid_4408 |
| variant_5845 | RKKLLKKIPPKFLKSAKKF | seqid_4409 |
| variant_5846 | FKKLLKKIPPKFLKSAKKF | seqid_4410 |
| variant_5847 | KWKLLKKIPPKFLKSAKKF | seqid_4411 |
| variant_5848 | RWKLLKKIPPKFLKSAKKF | seqid_4412 |
| variant_5849 | FWKLLKKIPPKFLKSAKKF | seqid_4413 |
| variant_5850 | KKKKLKKIPPKFLKSAKKF | seqid_4414 |
| variant_5851 | RKKKLKKIPPKFLKSAKKF | seqid_4415 |
| variant_5852 | FKKKLKKIPPKFLKSAKKF | seqid_4416 |
| variant_5853 | KWKKLKKIPPKFLKSAKKF | seqid_4417 |
| variant_5854 | RWKKLKKIPPKFLKSAKKF | seqid_4418 |
| variant_5855 | FWKKLKKIPPKFLKSAKKF | seqid_4419 |
| variant_5904 | KKKLFLKIPKFLKSAKKF | seqid_4420 |
| variant_5905 | RKKLFLKIPKFLKSAKKF | seqid_4421 |
| variant_5906 | FKKLFLKIPKFLKSAKKF | seqid_4422 |
| variant_5907 | KWKLFLKIPKFLKSAKKF | seqid_4423 |
| variant_5908 | RWKLFLKIPKFLKSAKKF | seqid_4424 |
| variant_5909 | FWKLFLKIPKFLKSAKKF | seqid_4425 |
| variant_5910 | KKKKFLKIPKFLKSAKKF | seqid_4426 |
| variant_5911 | RKKKFLKIPKFLKSAKKF | seqid_4427 |
| variant_5912 | FKKKFLKIPKFLKSAKKF | seqid_4428 |
| variant_5913 | KWKKFLKIPKFLKSAKKF | seqid_4429 |
| variant_5914 | RWKKFLKIPKFLKSAKKF | seqid_4430 |
| variant_5915 | FWKKFLKIPKFLKSAKKF | seqid_4431 |
| variant_5916 | KKKLLLKIPKFLKSAKKF | seqid_4432 |
| variant_5917 | RKKLLLKIPKFLKSAKKF | seqid_4433 |
| variant_5918 | FKKLLLKIPKFLKSAKKF | seqid_4434 |
| variant_5919 | KWKLLLKIPKFLKSAKKF | seqid_4435 |
| variant_5920 | RWKLLLKIPKFLKSAKKF | seqid_4436 |
| variant_5921 | FWKLLLKIPKFLKSAKKF | seqid_4437 |
| variant_5922 | KKKKLLKIPKFLKSAKKF | seqid_4438 |
| variant_5923 | RKKKLLKIPKFLKSAKKF | seqid_4439 |
| variant_5924 | FKKKLLKIPKFLKSAKKF | seqid_4440 |
| variant_5925 | KWKKLLKIPKFLKSAKKF | seqid_4441 |
| variant_5926 | RWKKLLKIPKFLKSAKKF | seqid_4442 |
| variant_5927 | FWKKLLKIPKFLKSAKKF | seqid_4443 |
| variant_5928 | KKKLFKKIPKFLKSAKKF | seqid_4444 |
| variant_5929 | RKKLFKKIPKFLKSAKKF | seqid_4445 |
| variant_5930 | FKKLFKKIPKFLKSAKKF | seqid_4446 |
| variant_5931 | KWKLFKKIPKFLKSAKKF | seqid_4447 |
| variant_5932 | RWKLFKKIPKFLKSAKKF | seqid_4448 |
| variant_5933 | FWKLFKKIPKFLKSAKKF | seqid_4449 |
| variant_5934 | KKKKFKKIPKFLKSAKKF | seqid_4450 |
| variant_5935 | RKKKFKKIPKFLKSAKKF | seqid_4451 |
| variant_5936 | FKKKFKKIPKFLKSAKKF | seqid_4452 |
| variant_5937 | KWKKFKKIPKFLKSAKKF | seqid_4453 |
| variant_5938 | RWKKFKKIPKFLKSAKKF | seqid_4454 |
| variant_5939 | FWKKFKKIPKFLKSAKKF | seqid_4455 |
| variant_5940 | KKKLLKKIPKFLKSAKKF | seqid_4456 |
| variant_5941 | RKKLLKKIPKFLKSAKKF | seqid_4457 |
| variant_5942 | FKKLLKKIPKFLKSAKKF | seqid_4458 |
| variant_5943 | KWKLLKKIPKFLKSAKKF | seqid_4459 |
| variant_5944 | RWKLLKKIPKFLKSAKKF | seqid_4460 |
| variant_5945 | FWKLLKKIPKFLKSAKKF | seqid_4461 |
| variant_5946 | KKKKLKKIPKFLKSAKKF | seqid_4462 |
| variant_5947 | RKKKLKKIPKFLKSAKKF | seqid_4463 |
| variant_5948 | FKKKLKKIPKFLKSAKKF | seqid_4464 |
| variant_5949 | KWKKLKKIPKFLKSAKKF | seqid_4465 |
| variant_5950 | RWKKLKKIPKFLKSAKKF | seqid_4466 |
| variant_5951 | FWKKLKKIPKFLKSAKKF | seqid_4467 |
| variant_5952 | KKKLFLKIPPPKFKKSAKKF | seqid_4468 |
| variant_5953 | RKKLFLKIPPPKFKKSAKKF | seqid_4469 |
| variant_5954 | FKKLFLKIPPPKFKKSAKKF | seqid_4470 |
| variant_5955 | KWKLFLKIPPPKFKKSAKKF | seqid_4471 |
| variant_5956 | RWKLFLKIPPPKFKKSAKKF | seqid_4472 |
| variant_5957 | FWKLFLKIPPPKFKKSAKKF | seqid_4473 |
| variant_5958 | KKKKFLKIPPPKFKKSAKKF | seqid_4474 |
| variant_5959 | RKKKFLKIPPPKFKKSAKKF | seqid_4475 |
| variant_5960 | FKKKFLKIPPPKFKKSAKKF | seqid_4476 |
| variant_5961 | KWKKFLKIPPPKFKKSAKKF | seqid_4477 |
| variant_5962 | RWKKFLKIPPPKFKKSAKKF | seqid_4478 |
| variant_5963 | FWKKFLKIPPPKFKKSAKKF | seqid_4479 |
| variant_5964 | KKKLLLKIPPPKFKKSAKKF | seqid_4480 |
| variant_5965 | RKKLLLKIPPPKFKKSAKKF | seqid_4481 |
| variant_5966 | FKKLLLKIPPPKFKKSAKKF | seqid_4482 |
| variant_5967 | KWKLLLKIPPPKFKKSAKKF | seqid_4483 |
| variant_5968 | RWKLLLKIPPPKFKKSAKKF | seqid_4484 |
| variant_5969 | FWKLLLKIPPPKFKKSAKKF | seqid_4485 |
| variant_5970 | KKKKLLKIPPPKFKKSAKKF | seqid_4486 |
| variant_5971 | RKKKLLKIPPPKFKKSAKKF | seqid_4487 |
| variant_5972 | FKKKLLKIPPPKFKKSAKKF | seqid_4488 |
| variant_5973 | KWKKLLKIPPPKFKKSAKKF | seqid_4489 |
| variant_5974 | RWKKLLKIPPPKFKKSAKKF | seqid_4490 |
| variant_5975 | FWKKLLKIPPPKFKKSAKKF | seqid_4491 |
| variant_5976 | KKKLFKKIPPPKFKKSAKKF | seqid_4492 |
| variant_5977 | RKKLFKKIPPPKFKKSAKKF | seqid_4493 |
| variant_5978 | FKKLFKKIPPPKFKKSAKKF | seqid_4494 |
| variant_5979 | KWKLFKKIPPPKFKKSAKKF | seqid_4495 |
| variant_5980 | RWKLFKKIPPPKFKKSAKKF | seqid_4496 |
| variant_5981 | FWKLFKKIPPPKFKKSAKKF | seqid_4497 |
| variant_5982 | KKKKFKKIPPPKFKKSAKKF | seqid_4498 |
| variant_5983 | RKKKFKKIPPPKFKKSAKKF | seqid_4499 |
| variant_5984 | FKKKFKKIPPPKFKKSAKKF | seqid_4500 |
| variant_5985 | KWKKFKKIPPPKFKKSAKKF | seqid_4501 |
| variant_5986 | RWKKFKKIPPPKFKKSAKKF | seqid_4502 |
| variant_5987 | FWKKFKKIPPPKFKKSAKKF | seqid_4503 |
| variant_5988 | KKKLLKKIPPPKFKKSAKKF | seqid_4504 |
| variant_5989 | RKKLLKKIPPPKFKKSAKKF | seqid_4505 |
| variant_5990 | FKKLLKKIPPPKFKKSAKKF | seqid_4506 |
| variant_5991 | KWKLLKKIPPPKFKKSAKKF | seqid_4507 |
| variant_5992 | RWKLLKKIPPPKFKKSAKKF | seqid_4508 |
| variant_5993 | FWKLLKKIPPPKFKKSAKKF | seqid_4509 |
| variant_5994 | KKKKLKKIPPPKFKKSAKKF | seqid_4510 |
| variant_5995 | RKKKLKKIPPPKFKKSAKKF | seqid_4511 |
| variant_5996 | FKKKLKKIPPPKFKKSAKKF | seqid_4512 |
| variant_5997 | KWKKLKKIPPPKFKKSAKKF | seqid_4513 |
| variant_5998 | RWKKLKKIPPPKFKKSAKKF | seqid_4514 |
| variant_5999 | FWKKLKKIPPPKFKKSAKKF | seqid_4515 |
| variant_6000 | KKKLFLKIPPKFKKSAKKF | seqid_4516 |
| variant_6001 | RKKLFLKIPPKFKKSAKKF | seqid_4517 |
| variant_6002 | FKKLFLKIPPKFKKSAKKF | seqid_4518 |
| variant_6003 | KWKLFLKIPPKFKKSAKKF | seqid_4519 |
| variant_6004 | RWKLFLKIPPKFKKSAKKF | seqid_4520 |
| variant_6005 | FWKLFLKIPPKFKKSAKKF | seqid_4521 |
| variant_6006 | KKKKFLKIPPKFKKSAKKF | seqid_4522 |
| variant_6007 | RKKKFLKIPPKFKKSAKKF | seqid_4523 |
| variant_6008 | FKKKFLKIPPKFKKSAKKF | seqid_4524 |
| variant_6009 | KWKKFLKIPPKFKKSAKKF | seqid_4525 |
| variant_6010 | RWKKFLKIPPKFKKSAKKF | seqid_4526 |
| variant_6011 | FWKKFLKIPPKFKKSAKKF | seqid_4527 |
| variant_6012 | KKKLLLKIPPKFKKSAKKF | seqid_4528 |
| variant_6013 | RKKLLLKIPPKFKKSAKKF | seqid_4529 |
| variant_6014 | FKKLLLKIPPKFKKSAKKF | seqid_4530 |
| variant_6015 | KWKLLLKIPPKFKKSAKKF | seqid_4531 |
| variant_6016 | RWKLLLKIPPKFKKSAKKF | seqid_4532 |
| variant_6017 | FWKLLLKIPPKFKKSAKKF | seqid_4533 |
| variant_6018 | KKKKLLKIPPKFKKSAKKF | seqid_4534 |
| variant_6019 | RKKKLLKIPPKFKKSAKKF | seqid_4535 |
| variant_6020 | FKKKLLKIPPKFKKSAKKF | seqid_4536 |
| variant_6021 | KWKKLLKIPPKFKKSAKKF | seqid_4537 |
| variant_6022 | RWKKLLKIPPKFKKSAKKF | seqid_4538 |
| variant_6023 | FWKKLLKIPPKFKKSAKKF | seqid_4539 |
| variant_6024 | KKKLFKKIPPKFKKSAKKF | seqid_4540 |
| variant_6025 | RKKLFKKIPPKFKKSAKKF | seqid_4541 |
| variant_6026 | FKKLFKKIPPKFKKSAKKF | seqid_4542 |
| variant_6027 | KWKLFKKIPPKFKKSAKKF | seqid_4543 |
| variant_6028 | RWKLFKKIPPKFKKSAKKF | seqid_4544 |
| variant_6029 | FWKLFKKIPPKFKKSAKKF | seqid_4545 |
| variant_6030 | KKKKFKKIPPKFKKSAKKF | seqid_4546 |
| variant_6031 | RKKKFKKIPPKFKKSAKKF | seqid_4547 |
| variant_6032 | FKKKFKKIPPKFKKSAKKF | seqid_4548 |
| variant_6033 | KWKKFKKIPPKFKKSAKKF | seqid_4549 |
| variant_6034 | RWKKFKKIPPKFKKSAKKF | seqid_4550 |
| variant_6035 | FWKKFKKIPPKFKKSAKKF | seqid_4551 |
| variant_6036 | KKKLLKKIPPKFKKSAKKF | seqid_4552 |
| variant_6037 | RKKLLKKIPPKFKKSAKKF | seqid_4553 |
| variant_6038 | FKKLLKKIPPKFKKSAKKF | seqid_4554 |
| variant_6039 | KWKLLKKIPPKFKKSAKKF | seqid_4555 |
| variant_6040 | RWKLLKKIPPKFKKSAKKF | seqid_4556 |
| variant_6041 | FWKLLKKIPPKFKKSAKKF | seqid_4557 |
| variant_6042 | KKKKLKKIPPKFKKSAKKF | seqid_4558 |
| variant_6043 | RKKKLKKIPPKFKKSAKKF | seqid_4559 |
| variant_6044 | FKKKLKKIPPKFKKSAKKF | seqid_4560 |
| variant_6045 | KWKKLKKIPPKFKKSAKKF | seqid_4561 |
| variant_6046 | RWKKLKKIPPKFKKSAKKF | seqid_4562 |
| variant_6047 | FWKKLKKIPPKFKKSAKKF | seqid_4563 |
| variant_6096 | KKKLFLKIPKFKKSAKKF | seqid_4564 |
| variant_6097 | RKKLFLKIPKFKKSAKKF | seqid_4565 |
| variant_6098 | FKKLFLKIPKFKKSAKKF | seqid_4566 |
| variant_6099 | KWKLFLKIPKFKKSAKKF | seqid_4567 |
| variant_6100 | RWKLFLKIPKFKKSAKKF | seqid_4568 |
| variant_6101 | FWKLFLKIPKFKKSAKKF | seqid_4569 |
| variant_6102 | KKKKFLKIPKFKKSAKKF | seqid_4570 |
| variant_6103 | RKKKFLKIPKFKKSAKKF | seqid_4571 |
| variant_6104 | FKKKFLKIPKFKKSAKKF | seqid_4572 |
| variant_6105 | KWKKFLKIPKFKKSAKKF | seqid_4573 |
| variant_6106 | RWKKFLKIPKFKKSAKKF | seqid_4574 |
| variant_6107 | FWKKFLKIPKFKKSAKKF | seqid_4575 |
| variant_6108 | KKKLLLKIPKFKKSAKKF | seqid_4576 |
| variant_6109 | RKKLLLKIPKFKKSAKKF | seqid_4577 |
| variant_6110 | FKKLLLKIPKFKKSAKKF | seqid_4578 |
| variant_6111 | KWKLLLKIPKFKKSAKKF | seqid_4579 |
| variant_6112 | RWKLLLKIPKFKKSAKKF | seqid_4580 |
| variant_6113 | FWKLLLKIPKFKKSAKKF | seqid_4581 |
| variant_6114 | KKKKLLKIPKFKKSAKKF | seqid_4582 |
| variant_6115 | RKKKLLKIPKFKKSAKKF | seqid_4583 |
| variant_6116 | FKKKLLKIPKFKKSAKKF | seqid_4584 |
| variant_6117 | KWKKLLKIPKFKKSAKKF | seqid_4585 |
| variant_6118 | RWKKLLKIPKFKKSAKKF | seqid_4586 |
| variant_6119 | FWKKLLKIPKFKKSAKKF | seqid_4587 |
| variant_6120 | KKKLFKKIPKFKKSAKKF | seqid_4588 |
| variant_6121 | RKKLFKKIPKFKKSAKKF | seqid_4589 |
| variant_6122 | FKKLFKKIPKFKKSAKKF | seqid_4590 |
| variant_6123 | KWKLFKKIPKFKKSAKKF | seqid_4591 |
| variant_6124 | RWKLFKKIPKFKKSAKKF | seqid_4592 |
| variant_6125 | FWKLFKKIPKFKKSAKKF | seqid_4593 |
| variant_6126 | KKKKFKKIPKFKKSAKKF | seqid_4594 |
| variant_6127 | RKKKFKKIPKFKKSAKKF | seqid_4595 |
| variant_6128 | FKKKFKKIPKFKKSAKKF | seqid_4596 |
| variant_6129 | KWKKFKKIPKFKKSAKKF | seqid_4597 |
| variant_6130 | RWKKFKKIPKFKKSAKKF | seqid_4598 |
| variant_6131 | FWKKFKKIPKFKKSAKKF | seqid_4599 |
| variant_6132 | KKKLLKKIPKFKKSAKKF | seqid_4600 |
| variant_6133 | RKKLLKKIPKFKKSAKKF | seqid_4601 |
| variant_6134 | FKKLLKKIPKFKKSAKKF | seqid_4602 |
| variant_6135 | KWKLLKKIPKFKKSAKKF | seqid_4603 |
| variant_6136 | RWKLLKKIPKFKKSAKKF | seqid_4604 |
| variant_6137 | FWKLLKKIPKFKKSAKKF | seqid_4605 |
| variant_6138 | KKKKLKKIPKFKKSAKKF | seqid_4606 |
| variant_6139 | RKKKLKKIPKFKKSAKKF | seqid_4607 |
| variant_6140 | FKKKLKKIPKFKKSAKKF | seqid_4608 |
| variant_6141 | KWKKLKKIPKFKKSAKKF | seqid_4609 |
| variant_6142 | RWKKLKKIPKFKKSAKKF | seqid_4610 |
| variant_6143 | FWKKLKKIPKFKKSAKKF | seqid_4611 |

3.1.2 Sequence motif
KX₂KX₃X₄X₅KIPX₁₁X₁₂KFLHX₈AKKF
(SEQ ID NO: 10)

| | | |
|---|---|---|
| variant_0 | KLKLLLKIPPPKFLHAAKKF | seqid_4612 |
| variant_1 | KWKLLLKIPPPKFLHAAKKF | seqid_2329 |
| variant_2 | KLKKLLKIPPPKFLHAAKKF | seqid_4613 |
| variant_3 | KWKKLLKIPPPKFLHAAKKF | seqid_2335 |
| variant_4 | KLKLFLKIPPPKFLHAAKKF | seqid_4614 |
| variant_5 | KWKLFLKIPPPKFLHAAKKF | seqid_2317 |
| variant_6 | KLKKFLKIPPPKFLHAAKKF | seqid_4615 |
| variant_7 | KWKKFLKIPPPKFLHAAKKF | seqid_2323 |
| variant_8 | KLKLLKKIPPPKFLHAAKKF | seqid_4616 |
| variant_9 | KWKLLKKIPPPKFLHAAKKF | seqid_2353 |
| variant_10 | KLKKLKKIPPPKFLHAAKKF | seqid_4617 |
| variant_11 | KWKKLKKIPPPKFLHAAKKF | seqid_2359 |
| variant_12 | KLKLFKKIPPPKFLHAAKKF | seqid_4618 |
| variant_13 | KWKLFKKIPPPKFLHAAKKF | seqid_2341 |
| variant_14 | KLKKFKKIPPPKFLHAAKKF | seqid_4619 |
| variant_15 | KWKKFKKIPPPKFLHAAKKF | seqid_2347 |
| variant_16 | KLKLLLKIPPKFLHAAKKF | seqid_4620 |
| variant_17 | KWKLLLKIPPKFLHAAKKF | seqid_2377 |
| variant_18 | KLKKLLKIPPKFLHAAKKF | seqid_4621 |
| variant_19 | KWKKLLKIPPKFLHAAKKF | seqid_2383 |
| variant_20 | KLKLFLKIPPKFLHAAKKF | seqid_4622 |
| variant_21 | KWKLFLKIPPKFLHAAKKF | seqid_2365 |
| variant_22 | KLKKFLKIPPKFLHAAKKF | seqid_4623 |
| variant_23 | KWKKFLKIPPKFLHAAKKF | seqid_2371 |
| variant_24 | KLKLLKKIPPKFLHAAKKF | seqid_4624 |
| variant_25 | KWKLLKKIPPKFLHAAKKF | seqid_2401 |
| variant_26 | KLKKLKKIPPKFLHAAKKF | seqid_4625 |
| variant_27 | KWKKLKKIPPKFLHAAKKF | seqid_2407 |
| variant_28 | KLKLFKKIPPKFLHAAKKF | seqid_4626 |
| variant_29 | KWKLFKKIPPKFLHAAKKF | seqid_2389 |
| variant_30 | KLKKFKKIPPKFLHAAKKF | seqid_4627 |
| variant_31 | KWKKFKKIPPKFLHAAKKF | seqid_2395 |
| variant_48 | KLKLLLKIPKFLHAAKKF | seqid_4628 |
| variant_49 | KWKLLLKIPKFLHAAKKF | seqid_2424 |
| variant_50 | KLKKLLKIPKFLHAAKKF | seqid_4629 |
| variant_51 | KWKKLLKIPKFLHAAKKF | seqid_9 |
| variant_52 | KLKLFLKIPKFLHAAKKF | seqid_4630 |
| variant_53 | KWKLFLKIPKFLHAAKKF | seqid_2413 |
| variant_54 | KLKKFLKIPKFLHAAKKF | seqid_4631 |
| variant_55 | KWKKFLKIPKFLHAAKKF | seqid_8 |
| variant_56 | KLKLLKKIPKFLHAAKKF | seqid_4632 |
| variant_57 | KWKLLKKIPKFLHAAKKF | seqid_2445 |
| variant_58 | KLKKLKKIPKFLHAAKKF | seqid_4633 |
| variant_59 | KWKKLKKIPKFLHAAKKF | seqid_2451 |
| variant_60 | KLKLFKKIPKFLHAAKKF | seqid_4634 |
| variant_61 | KWKLFKKIPKFLHAAKKF | seqid_7 |
| variant_62 | KLKKFKKIPKFLHAAKKF | seqid_4635 |
| variant_63 | KWKKFKKIPKFLHAAKKF | seqid_2439 |
| variant_64 | KLKLLLKIPPPKFLHVAKKF | seqid_4636 |
| variant_65 | KWKLLLKIPPPKFLHVAKKF | seqid_3475 |
| variant_66 | KLKKLLKIPPPKFLHVAKKF | seqid_4637 |
| variant_67 | KWKKLLKIPPPKFLHVAKKF | seqid_3481 |
| variant_68 | KLKLFLKIPPPKFLHVAKKF | seqid_4638 |
| variant_69 | KWKLFLKIPPPKFLHVAKKF | seqid_3463 |
| variant_70 | KLKKFLKIPPPKFLHVAKKF | seqid_4639 |
| variant_71 | KWKKFLKIPPPKFLHVAKKF | seqid_3469 |
| variant_72 | KLKLLKKIPPPKFLHVAKKF | seqid_4640 |
| variant_73 | KWKLLKKIPPPKFLHVAKKF | seqid_3499 |
| variant_74 | KLKKLKKIPPPKFLHVAKKF | seqid_4641 |
| variant_75 | KWKKLKKIPPPKFLHVAKKF | seqid_3505 |
| variant_76 | KLKLFKKIPPPKFLHVAKKF | seqid_4642 |
| variant_77 | KWKLFKKIPPPKFLHVAKKF | seqid_3487 |
| variant_78 | KLKKFKKIPPPKFLHVAKKF | seqid_4643 |
| variant_79 | KWKKFKKIPPPKFLHVAKKF | seqid_3493 |
| variant_80 | KLKLLLKIPPKFLHVAKKF | seqid_4644 |
| variant_81 | KWKLLLKIPPKFLHVAKKF | seqid_3523 |
| variant_82 | KLKKLLKIPPKFLHVAKKF | seqid_4645 |
| variant_83 | KWKKLLKIPPKFLHVAKKF | seqid_3529 |
| variant_84 | KLKLFLKIPPKFLHVAKKF | seqid_4646 |
| variant_85 | KWKLFLKIPPKFLHVAKKF | seqid_3511 |
| variant_86 | KLKKFLKIPPKFLHVAKKF | seqid_4647 |
| variant_87 | KWKKFLKIPPKFLHVAKKF | seqid_3517 |
| variant_88 | KLKLLKKIPPKFLHVAKKF | seqid_4648 |
| variant_89 | KWKLLKKIPPKFLHVAKKF | seqid_3547 |
| variant_90 | KLKKLKKIPPKFLHVAKKF | seqid_4649 |
| variant_91 | KWKKLKKIPPKFLHVAKKF | seqid_3553 |
| variant_92 | KLKLFKKIPPKFLHVAKKF | seqid_4650 |
| variant_93 | KWKLFKKIPPKFLHVAKKF | seqid_3535 |
| variant_94 | KLKKFKKIPPKFLHVAKKF | seqid_4651 |
| variant_95 | KWKKFKKIPPKFLHVAKKF | seqid_3541 |
| variant_112 | KLKLLLKIPKFLHVAKKF | seqid_4652 |
| variant_113 | KWKLLLKIPKFLHVAKKF | seqid_3571 |
| variant_114 | KLKKLLKIPKFLHVAKKF | seqid_4653 |
| variant_115 | KWKKLLKIPKFLHVAKKF | seqid_3577 |
| variant_116 | KLKLFLKIPKFLHVAKKF | seqid_4654 |
| variant_117 | KWKLFLKIPKFLHVAKKF | seqid_3559 |
| variant_118 | KLKKFLKIPKFLHVAKKF | seqid_4655 |
| variant_119 | KWKKFLKIPKFLHVAKKF | seqid_3565 |
| variant_120 | KLKLLKKIPKFLHVAKKF | seqid_4656 |
| variant_121 | KWKLLKKIPKFLHVAKKF | seqid_3595 |
| variant_122 | KLKKLKKIPKFLHVAKKF | seqid_4657 |
| variant_123 | KWKKLKKIPKFLHVAKKF | seqid_3601 |
| variant_124 | KLKLFKKIPKFLHVAKKF | seqid_4658 |
| variant_125 | KWKLFKKIPKFLHVAKKF | seqid_3583 |
| variant_126 | KLKKFKKIPKFLHVAKKF | seqid_4659 |
| variant_127 | KWKKFKKIPKFLHVAKKF | seqid_3589 |
| variant_128 | KLKLLLKIPPPKFLHLAKKF | seqid_4660 |
| variant_129 | KWKLLLKIPPPKFLHLAKKF | seqid_2901 |
| variant_130 | KLKKLLKIPPPKFLHLAKKF | seqid_4661 |
| variant_131 | KWKKLLKIPPPKFLHLAKKF | seqid_2907 |
| variant_132 | KLKLFLKIPPPKFLHLAKKF | seqid_4662 |
| variant_133 | KWKLFLKIPPPKFLHLAKKF | seqid_2889 |
| variant_134 | KLKKFLKIPPPKFLHLAKKF | seqid_4663 |
| variant_135 | KWKKFLKIPPPKFLHLAKKF | seqid_2895 |
| variant_136 | KLKLLKKIPPPKFLHLAKKF | seqid_4664 |
| variant_137 | KWKLLKKIPPPKFLHLAKKF | seqid_2925 |
| variant_138 | KLKKLKKIPPPKFLHLAKKF | seqid_4665 |
| variant_139 | KWKKLKKIPPPKFLHLAKKF | seqid_2931 |
| variant_140 | KLKLFKKIPPPKFLHLAKKF | seqid_4666 |
| variant_141 | KWKLFKKIPPPKFLHLAKKF | seqid_2913 |
| variant_142 | KLKKFKKIPPPKFLHLAKKF | seqid_4667 |
| variant_143 | KWKKFKKIPPPKFLHLAKKF | seqid_2919 |
| variant_144 | KLKLLLKIPPKFLHLAKKF | seqid_4668 |
| variant_145 | KWKLLLKIPPKFLHLAKKF | seqid_2949 |
| variant_146 | KLKKLLKIPPKFLHLAKKF | seqid_4669 |
| variant_147 | KWKKLLKIPPKFLHLAKKF | seqid_2955 |
| variant_148 | KLKLFLKIPPKFLHLAKKF | seqid_4670 |
| variant_149 | KWKLFLKIPPKFLHLAKKF | seqid_2937 |
| variant_150 | KLKKFLKIPPKFLHLAKKF | seqid_4671 |
| variant_151 | KWKKFLKIPPKFLHLAKKF | seqid_2943 |
| variant_152 | KLKLLKKIPPKFLHLAKKF | seqid_4672 |
| variant_153 | KWKLLKKIPPKFLHLAKKF | seqid_2973 |
| variant_154 | KLKKLKKIPPKFLHLAKKF | seqid_4673 |
| variant_155 | KWKKLKKIPPKFLHLAKKF | seqid_2979 |
| variant_156 | KLKLFKKIPPKFLHLAKKF | seqid_4674 |
| variant_157 | KWKLFKKIPPKFLHLAKKF | seqid_2961 |
| variant_158 | KLKKFKKIPPKFLHLAKKF | seqid_4675 |
| variant_159 | KWKKFKKIPPKFLHLAKKF | seqid_2967 |
| variant_176 | KLKLLLKIPKFLHLAKKF | seqid_4676 |
| variant_177 | KWKLLLKIPKFLHLAKKF | seqid_2997 |
| variant_178 | KLKKLLKIPKFLHLAKKF | seqid_4677 |
| variant_179 | KWKKLLKIPKFLHLAKKF | seqid_3003 |
| variant_180 | KLKLFLKIPKFLHLAKKF | seqid_4678 |
| variant_181 | KWKLFLKIPKFLHLAKKF | seqid_2985 |
| variant_182 | KLKKFLKIPKFLHLAKKF | seqid_4679 |
| variant_183 | KWKKFLKIPKFLHLAKKF | seqid_2991 |
| variant_184 | KLKLLKKIPKFLHLAKKF | seqid_4680 |
| variant_185 | KWKLLKKIPKFLHLAKKF | seqid_3019 |
| variant_186 | KLKKLKKIPKFLHLAKKF | seqid_4681 |
| variant_187 | KWKKLKKIPKFLHLAKKF | seqid_3025 |
| variant_188 | KLKLFKKIPKFLHLAKKF | seqid_4682 |
| variant_189 | KWKLFKKIPKFLHLAKKF | seqid_3 |
| variant_190 | KLKKFKKIPKFLHLAKKF | seqid_4683 |
| variant_191 | KWKKFKKIPKFLHLAKKF | seqid_3013 |
| variant_192 | KLKLLLKIPPPKFLHSAKKF | seqid_4684 |
| variant_193 | KWKLLLKIPPPKFLHSAKKF | seqid_4051 |
| variant_194 | KLKKLLKIPPPKFLHSAKKF | seqid_4685 |
| variant_195 | KWKKLLKIPPPKFLHSAKKF | seqid_4057 |
| variant_196 | KLKLFLKIPPPKFLHSAKKF | seqid_4686 |
| variant_197 | KWKLFLKIPPPKFLHSAKKF | seqid_4039 |
| variant_198 | KLKKFLKIPPPKFLHSAKKF | seqid_4687 |
| variant_199 | KWKKFLKIPPPKFLHSAKKF | seqid_4045 |
| variant_200 | KLKLLKKIPPPKFLHSAKKF | seqid_4688 |
| variant_201 | KWKLLKKIPPPKFLHSAKKF | seqid_4075 |
| variant_202 | KLKKLKKIPPPKFLHSAKKF | seqid_4689 |
| variant_203 | KWKKLKKIPPPKFLHSAKKF | seqid_4081 |
| variant_204 | KLKLFKKIPPPKFLHSAKKF | seqid_4690 |
| variant_205 | KWKLFKKIPPPKFLHSAKKF | seqid_4063 |
| variant_206 | KLKKFKKIPPPKFLHSAKKF | seqid_4691 |
| variant_207 | KWKKFKKIPPPKFLHSAKKF | seqid_4069 |
| variant_208 | KLKLLLKIPPKFLHSAKKF | seqid_4692 |
| variant_209 | KWKLLLKIPPKFLHSAKKF | seqid_4099 |
| variant_210 | KLKKLLKIPPKFLHSAKKF | seqid_4693 |
| variant_211 | KWKKLLKIPPKFLHSAKKF | seqid_4105 |
| variant_212 | KLKLFLKIPPKFLHSAKKF | seqid_4694 |
| variant_213 | KWKLFLKIPPKFLHSAKKF | seqid_4087 |
| variant_214 | KLKKFLKIPPKFLHSAKKF | seqid_4695 |
| variant_215 | KWKKFLKIPPKFLHSAKKF | seqid_4093 |
| variant_216 | KLKLLKKIPPKFLHSAKKF | seqid_4696 |
| variant_217 | KWKLLKKIPPKFLHSAKKF | seqid_4123 |
| variant_218 | KLKKLKKIPPKFLHSAKKF | seqid_4697 |
| variant_219 | KWKKLKKIPPKFLHSAKKF | seqid_4129 |
| variant_220 | KLKLFKKIPPKFLHSAKKF | seqid_4698 |
| variant_221 | KWKLFKKIPPKFLHSAKKF | seqid_4111 |
| variant_222 | KLKKFKKIPPKFLHSAKKF | seqid_4699 |
| variant_223 | KWKKFKKIPPKFLHSAKKF | seqid_4117 |
| variant_240 | KLKLLLKIPKFLHSAKKF | seqid_4700 |
| variant_241 | KWKLLLKIPKFLHSAKKF | seqid_4147 |
| variant_242 | KLKKLLKIPKFLHSAKKF | seqid_4701 |
| variant_243 | KWKKLLKIPKFLHSAKKF | seqid_4153 |
| variant_244 | KLKLFLKIPKFLHSAKKF | seqid_4702 |
| variant_245 | KWKLFLKIPKFLHSAKKF | seqid_4135 |
| variant_246 | KLKKFLKIPKFLHSAKKF | seqid_4703 |
| variant_247 | KWKKFLKIPKFLHSAKKF | seqid_4141 |
| variant_248 | KLKLLKKIPKFLHSAKKF | seqid_4704 |
| variant_249 | KLNKLLKKIPKFLHSAKKF | seqid_4171 |
| variant_250 | KLKKLKKIPKFLHSAKKF | seqid_4705 |
| variant_251 | KWKKLKKIPKFLHSAKKF | seqid_4177 |
| variant_252 | KLKLFKKIPKFLHSAKKF | seqid_4706 |
| variant_253 | KWKLFKKIPKFLHSAKKF | seqid_4708 |
| variant_254 | KLKKFKKIPKFLHSAKKF | seqid_4707 |
| variant_255 | KWKKFKKIPKFLHSAKKF | seqid_4165 |

### 3.1.3 Sequence Motif HEL1-HB-HEL2

[0067] As further non-limiting examples there may be mentioned:

| | | |
|---|---|---|
| Variant_1 | KWKLFKKIGPKFLHLAKKF-NH₂ | SEQ ID NO: 4709 |
| Variant_2 | KWKLFKKGPGKFLHSAKKF-NH₂ | SEQ ID NO: 4710 |
| Variant_3 | KWKLFKKIEKVGQGPGKFLHSAKKFG-NH₂ | SEQ ID NO: 4711 |
| Variant_4 | WKLFKKIPKFLHLAKKF-NH₂ | SEQ ID NO: 4712 |
| Variant_5 | FKLFLLIPKFLHLAKKF-NH₂ | SEQ ID NO: 4713 |
| Variant_6 | KWFKKIPKFLHLAKKF-NH₂ | SEQ ID NO: 4714 |
| Variant_7 | WFKKIPKFLHLAKKF-NH₂ | SEQ ID NO: 4715 |
| Variant_8 | KWKKIPKFLHLLKKF-NH₂ | SEQ ID NO: 4716 |
| Variant_9 | WFKKIPKFLHLLKKF-NH₂ | SEQ ID NO: 4717 |
| Variant_10 | KWKLFKKIPFLHLAKKF-NH₂ | SEQ ID NO: 4718 |
| Variant_11 | KWKLFKKIPKFLHLAKK-NH₂ | SEQ ID NO: 4719 |
| Variant_12 | KWKLFKKIPLHLAKKF-NH₂ | SEQ ID NO: 4720 |
| Variant_13 | KWKLFKKIPKFLHLAK-NH₂ | SEQ ID NO: 4721 |
| Variant_14 | KWKLFKKIPHLAKKF-NH₂ | SEQ ID NO: 4722 |
| Variant_15 | KWKLFKKIPKFLHLA-NH₂ | SEQ ID NO: 4723 |
| Variant_16 | KWKLFKKIPLAKKF-NH₂ | SEQ ID NO: 4724 |
| Variant_17 | KWKLFKKIPKFLHL-NH₂ | SEQ ID NO: 4725 |
| Variant_18 | FKKALHLFKPIKKFLKWK-NH₂ | SEQ ID NO: 4726 |
| Variant_19 | KFLHLAKKFPKWKLFKKI-NH₂ | SEQ ID NO: 4727 |
| Variant_20 | KWKKLLKKPLLKKLLKKL-NH₂ | SEQ ID NO: 4728 |
| Variant_21 | KWKLKPLLKKLLKKL-NH₂ | SEQ ID NO: 4729 |
| Variant_22 | KWKKLLKKPLKLKL-NH₂ | SEQ ID NO: 4730 |
| Variant_23 | KLLKKPLKLKL-NH₂ | SEQ ID NO: 4731 |

[0068] Also comprised by the present invention are the above sequences, wherein, however, the C-terminal end is not amidated and, consequently, such sequences, terminated by a carboxy group (in the form of its salt or as free acid).

### 3.1.4 Modifications of SEQ ID NO:3

[0069] In these modifications the peptide according to SEQ ID NO:3 is elongated by any arbitrary amino acid residue on its N-terminal and/or C-terminal end. Non-limiting examples of additional residues comprise Asp, Pro, Asn and Gly. If the N- and the C-terminal end is elongated simultaneously the additional N-terminal residue preferably is Pro or Gly and the corresponding C-terminal residue is Asp and Asn, respectively.

[0070] As further non-limiting examples there may be mentioned:

| | |
|---|---|
| PKWKLFKKIPKFLHLAKKF-NH₂ | (SEQ ID NO: 4732) |
| KWKLFKKIPKFLHLAKKFD-NH₂ | (SEQ ID NO: 4733) |
| PKWKLFKKIPKFLHLAKKFD-NH₂ | (SEQ ID NO: 4734) |
| GKWKLFKKIPKFLHLAKKF-NH₂ | (SEQ ID NO: 4735) |
| KWKLFKKIPKFLHLAKKFN-NH₂ | (SEQ ID NO: 4736) |
| GKWKLFKKIPKFLHLAKKFN-NH₂ | (SEQ ID NO: 4737) |
| PKWKLFKKIPKFLHLAKKFN-NH₂ | (SEQ ID NO: 4738) |

[0071] Also comprised are the above sequences wherein the C-terminal end is not amidated, and, consequently, sequences which are terminated by a carboxy group (in the form of its salt or free acid).

### 3.2 Further Modifications of Peptides According to the Invention

[0072] Besides the peptide sequences depicted above, preference is also given to functional equivalents, functional derivatives and salts of this sequence.

[0073] According to the invention, “functional equivalents” is also understood in particular as meaning mutants which, in at least one sequence position of the abovementioned amino acid sequences, have an amino acid other than the one specifically specified, but nevertheless have the property of preventing, inhibiting and treating dandruff. “Functional equivalents” thus include the mutants obtainable by one or more amino acid additions, substitutions, deletions and/or inversions, where said changes can occur in any sequence position provided they lead to a mutant with the profile of properties according to the invention. Functional equivalence exists in particular also when the reactivity patterns between mutant and unmodified polypeptide are in qualitative agreement.

[0074] “Functional equivalents” in the above sense are also “precursors” of the polypeptides described and also “functional derivatives” and “salts” of the polypeptides.

[0075] “Precursors” here are natural or synthetic precursors of the polypeptides with or without the desired biological activity.

[0076] Examples of suitable amino acid substitutions are given in the table below:

| Original residue | Examples of substitution |
|---|---|
| Ala | Ser |
| Arg | Lys |
| Asn | Gln; His |
| Asp | Glu |
| Cys | Ser |
| Gln | Asn |
| Glu | Asp |
| Gly | Pro |
| His | Asn; Gln |
| Ile | Leu; Val |
| Leu | Ile; Val |
| Lys | Arg; Gln; Glu |
| Met | Leu; Ile |
| Phe | Met; Leu; Tyr |
| Ser | Thr |
| Thr | Ser |
| Trp | Tyr |
| Tyr | Trp; Phe |
| Val | Ile; Leu |

[0077] The expression “salts” is understood as meaning both salts of carboxyl groups and also acid addition salts of amino groups of the peptide molecules according to the invention. Salts of carboxyl groups can be produced in a manner known per se and comprise inorganic salts, such as, for example, sodium, calcium, ammonium, iron and zinc salts, and also salts with organic bases, such as, for example, amines, such as triethanolamine, arginine, lysine, piperidine and the like. Acid addition salts, such as, for example, salts with mineral acids, such as hydrochloric acid or sulfuric acid and salts with organic acids, such as acetic acid and oxalic acid, are likewise provided by the invention.

[0078] “Functional derivatives” (or “derivatives”) of polypeptides according to the invention can likewise be produced on functional amino acid side groups or on their N or C terminal end using known techniques. Such derivatives comprise, for example, aliphatic esters of carboxylic acid groups, amides of carboxylic acid groups obtainable by reaction with ammonia or with a primary or secondary amine; N-acyl derivatives of free amino groups, prepared by reaction with acyl groups, or O-acyl derivatives of free hydroxy groups, prepared by reaction with acyl groups. Furthermore, 1 to 5, such as, for example, 2, 3 or 4, arbitrary D- or L-amino acid residues can additionally be covalently (peptidically) bonded at the N and/or C terminal end; or 1 to 5, as for example 1, 2, 3 or 4 residues may be missing at the N-terminal and/or C-terminal end. Non-limiting examples of additional N-terminal and/or C-terminal residues comprise Asp, Pro, Asn, Gly. In case the N-terminal end and the C-terminal end are simultaneously elongated, the N-terminal residue may preferably be Pro or Gly and the corresponding C-terminal residue may preferably be Asp and Asn, respectively.

[0079] Through variation of the amino acid sequence of the described antimicrobial peptides and fusing with additional protein or peptide sequences, it is possible to generate structures which specifically recognize certain surfaces, e.g. skin, nails, hair, or are recognized and bonded by these surfaces or the receptors present therein.

[0080] Consequently, it is possible to more effectively bring the described antimicrobial peptides to the desired site of action, and/or to improve their absorption. Through coupling and/or fusion of binding proteins to the described antimicrobial peptides, protein-peptide fusion products resulting therefrom would be steered in a more targeted manner to appropriate sites of action, e.g. microorganism surfaces or body compartments, and/or reside longer at these sites, resulting in an extended and improved peptide effect. Furthermore, through variation of the amino acid sequence of the described antimicrobial peptides and/or fusion with additional protein or peptide sequences, it is possible to steer the peptides to desired sites of action in a targeted manner in order to thus achieve, for example, higher peptide specificity, lower peptide consumption or peptide dose, and also more rapid or greater peptide effect.

### 3.3 Nucleic Acids, Expression Constructs, Vectors and Microorganisms According to the Invention

### 3.3.1 Nucleic Acids:

[0081] The invention furthermore comprises the nucleic acid molecules coding for the peptides and fusion peptides used according to the invention.

[0082] All of the nucleic acid sequences mentioned herein (single- and double-strand DNA and RNA sequences, such as, for example, cDNA and mRNA) can be prepared in a manner known per se by chemical synthesis from the nucleotide building blocks, such as, for example, by fragment condensation of individual overlapping, complementary nucleic acid building blocks of the double helix. The chemical synthesis of oligonucleotides can take place, for example, in a known manner according to the phosphoamidite method (Voet, Voet, 2^{nd} edition, Wiley Press New York, pages 896-897). The annealing of synthetic oligonucleotides and filling in of gaps with the aid of the Klenow fragment of DNA polymerase, and ligation reactions and also general cloning methods are described in Sambrook et al. (1989), Molecular Cloning: A laboratory manual, Cold Spring Harbor Laboratory Press.

[0083] The invention provides both isolated nucleic acid molecules which code for polypeptides or proteins according to the invention, or biologically active sections thereof, and to nucleic acid fragments which can be used, for example, as hybridization probes or primers for the identification or amplification of coding nucleic acids according to the invention.

[0084] The nucleic acid molecules according to the invention can additionally comprise untranslated sequences of the 3′ and/or 5′ end of the coding region of the gene.

[0085] An “isolated” nucleic acid molecule is separated off from other nucleic acid molecules which are present in the natural source of the nucleic acid and can, moreover, be essentially free of other cellular material or culture medium if produced by recombinant techniques, or be free of chemical precursors or other chemicals if chemically synthesized.

[0086] A nucleic acid molecule according to the invention can be isolated by means of standard molecular biology techniques and the sequence information provided according to the invention. For example, cDNA can be isolated from a suitable cDNA library by using one of the specifically disclosed complete sequences or a section thereof as hybridization probe and standard hybridization techniques (as described, for example, in Sambrook, J., Fritsch, E. F. and Maniatis, T. Molecular Cloning: A Laboratory Manual. 2nd edition, Cold Spring Harbor Laboratory, Cold Spring Harbor Laboratory Press, Cold Spring Harbor, N.Y., 1989). Moreover, a nucleic acid molecule comprising one of the disclosed sequences or a section thereof can be isolated by polymerase chain reaction using the oligonucleotide primers generated on the basis of this sequence. The nucleic acid amplified in this way can be cloned into a suitable vector and characterized by DNA sequence analysis. The oligonucleotides according to the invention can also be prepared by standard synthesis methods, e.g. using an automatic DNA synthesizer.

[0087] The invention furthermore comprises the nucleic acid molecules complementary to the specifically described nucleotide sequences, or a section thereof.

[0088] The nucleotide sequences according to the invention allow the generation of probes and primers which can be used for the identification and/or cloning of homologous sequences in other cell types and organisms. Such probes and primers usually comprise a nucleotide sequence range which, under stringent conditions, hybridizes to at least about 12, preferably at least about 25, such as, for example, about 40, 50 or 75, consecutive nucleotides of a sense strand of a nucleic acid sequence according to the invention or of a corresponding antisense strand.

[0089] Also comprised according to the invention are those nucleic acid sequences which comprise so-called silent mutations or which are modified, compared to a specifically specified sequence, according to the codon usage of a specific source organism or host organism, as are naturally occurring variants, such as, for example, splice variants or allelic variants, thereof. Likewise provided are sequences obtainable by conservative nucleotide substitutions (i.e. the amino acid in question is replaced by an amino acid of identical charge, size, polarity and/or solubility).

[0090] The invention also provides the molecules derived from the specifically disclosed nucleic acids by sequence polymorphisms. These genetic polymorphisms can exist between individuals within a population, owing to natural variation. These natural variations usually bring about a variance of from 1 to 5% in the nucleotide sequence of a gene.

[0091] Furthermore, the invention also comprises nucleic acid sequences which hybridize with the abovementioned coding sequences or are complementary thereto. These polynucleotides can be found when screening genomic or cDNA libraries and, if appropriate, be replicated therefrom by means of PCR using suitable primers and then isolated using suitable probes, for example. A further possibility is the transformation of suitable microorganisms with polynucleotides or vectors according to the invention, replication of the microorganisms and thus of the polynucleotides and subsequent isolation thereof. Moreover, polynucleotides according to the invention can also be synthesized by a chemical method.

[0092] The property of being able to “hybridize” to polynucleotides is understood as meaning the ability of a poly- or oligonucleotide, to bind, under stringent conditions, to a virtually complementary sequence while nonspecific bonds between noncomplementary partners do not take place under these conditions. For this purpose, the sequences should be 70-100%, preferably 90-100%, complementary. The property of complementary sequences of being able to bind specifically to one another is utilized, for example, in the Northern or Southern blot technique or during primer binding in PCR or RT-PCR. Usually, for this purpose, oligonucleotides above a length of 30 base pairs are used. Stringent conditions are understood as meaning, for example in the Northern blot technique, the use of a 50-70° C., preferably 60-65° C. hot washing solution, for example 0.1×SSC buffer with 0.1% SDS (20×SSC: 3 M NaCl, 0.3 M Na citrate, pH 7.0) for the elution of nonspecific hybridized cDNA probes or oligonucleotides. As mentioned above, in this process, only highly complementary nucleic acids remain bound to one another. Establishing stringent conditions is known to the person skilled in the art and is described, for example, in Ausubel et al., Current Protocols in Molecular Biology, John Wiley & Sons, N.Y. (1989), 6.3.1-6.3.6.

### 3.3.2 Expression Constructs and Vectors:

[0093] The invention moreover provides expression constructs comprising, under the genetic control of regulatory nucleic acid sequences, a nucleic acid sequence coding for a polypeptide according to the invention, and also vectors comprising at least one of these expression constructs. Preferably, such constructs according to the invention comprise a promoter 5′ upstream of the particular coding sequence and a terminator sequence 3′ downstream and also, if appropriate, further customary regulatory elements, in each case operatively linked to the coding sequence. An “operative linkage” is understood as meaning the sequential arrangement of promoter, coding sequence, terminator and, if appropriate further regulatory elements such that each of the regulatory elements can perform its function during the expression of the coding sequence as intended. Examples of operatively linkable sequences are targeting sequences and also enhancers, polyadenylation signals and the like. Further regulatory elements comprise selectable markers, amplification signals, replication origins and the like. Suitable regulatory sequences are described, for example, in Goeddel, Gene Expression Technology: Methods in Enzymology 185, Academic Press, San Diego, Calif. (1990).

[0094] In addition to the artificial regulatory sequences, the natural regulatory sequence may still be present upstream of the actual structural gene. Through genetic modification, this natural regulation can, if appropriate, be switched off and the expression of the genes increased or decreased. However, the gene construct can also be simpler in design, i.e. no additional regulatory signals are inserted upstream of the structure gene and the natural promoter together with its regulation is not removed. Instead, the natural regulatory sequence is mutated such that regulation no longer takes place and gene expression is increased or reduced. The nucleic acid sequences may be present in one or more copies in the gene construct.

[0095] Examples of promoters that can be used are: cos, tac, trp, tet, trp-tet, lpp, lac, lpp-lac, laclq, T7, T5, T3, gal, trc, ara, SP6, lambda-PR or in the lambda-PL promoter, which are advantageously used in Gram-negative bacteria; and also the Gram-positive promoters amy and SPO2, the yeast promoters ADC1, MFa, AC, P-60, CYC1, GAPDH or the plant promoters CaMV/35S, SSU, OCS, lib4, usp, STLS1, B33, not or the ubiquitin or phaseolin promoter. Particular preference is given to using inducible promoters, such as, for example, photo- and in particular temperature-inducible promoters, such as the PᵣPₗ promoter. In principle, all natural promoters with their regulatory sequences can be used. Moreover, synthetic promoters can also be used advantageously.

[0096] The specified regulatory sequences are intended to permit the targeted expression of the nucleic acid sequences and protein expression. Depending on the host organism, this may mean, for example, that the gene is expressed or overexpressed only after induction, or that it is immediately expressed and/or overexpressed.

[0097] The regulatory sequences or factors can here preferably have a beneficial effect on, and thereby increase or decrease, the expression. Thus, the regulatory elements can advantageously be enhanced at the transcriptional level by using strong transcription signals such as promoters and/or “enhancers”. However, in addition, it is also possible to enhance translation by, for example, improving the stability of the mRNA.

[0098] The expression cassette is prepared by fusing a suitable promoter with a suitable coding nucleotide sequence and a terminator signal or polyadenylation signal. For this purpose, customary recombinant and cloning techniques are used, as are described, for example, in T. Maniatis, E. F. Fritsch and J. Sambrook, Molecular Cloning: A Laboratory Manual, Cold Spring Harbor Laboratory, Cold Spring Harbor, N.Y. (1989) and in T. J. Silhavy, M. L. Berman and L. W. Enquist, Experiments with Gene Fusions, Cold Spring Harbor Laboratory, Cold Spring Harbor, N.Y. (1984) and in Ausubel, F. M. et al., Current Protocols in Molecular Biology, Greene Publishing Assoc. and Wiley Interscience (1987).

[0099] For expression, the recombinant nucleic acid construct or gene construct is advantageously inserted, in a suitable host organism, into a host-specific vector which facilitates optimal expression of the genes in the host. Vectors are well known to the person skilled in the art and can be found, for example, in “Cloning Vectors” (Pouwels P. H. et al., ed., Elsevier, Amsterdam-New York-Oxford, 1985). Apart from plasmids, vectors are also to be understood as meaning all other vectors known to the person skilled in the art, such as, for example, phages, viruses, such as SV40, CMV, baculovirus and adenovirus, transposons, IS elements, phasmids, cosmids, and linear or circular DNA. These vectors can be replicated autonomously in the host organism or be replicated chromosomally.

3.3.3 Examples of Suitable Expression Vectors which May be Mentioned are:

[0100] Customary fusion expression vectors, such as pGEX (Pharmacia Biotech Inc; Smith, D. B. and Johnson, K. S. (1988) Gene 67:31-40), pMAL (New England Biolabs, Beverly, Mass.) and pRIT 5 (Pharmacia, Piscataway, N.J.), in which glutathione-5-transferase (GST), maltose E binding protein or protein A is fused to the recombinant target protein.

[0101] Non-fusion protein expression vectors such as pTrc (Amann et al., (1988) Gene 69:301-315) and pET 11d (Studier et al. Gene Expression Technology: Methods in Enzymology 185, Academic Press, San Diego, Calif. (1990) 60-89).

[0102] Yeast expression vectors for expression in the yeast S. cerevisiae, such as pYepSec1 (Baldari et al., (1987) Embo J. 6:229-234), pMFa (Kurjan and Herskowitz (1982) Cell 30:933-943), pJRY88 (Schultz et al., (1987) Gene 54:113-123) and pYES2 (Invitrogen Corporation, San Diego, Calif.). Vectors and methods for the construction of vectors which are suitable for use in other fungi, such as filamentous fungi, comprise those which are described in detail in: van den Hondel, C. A. M. J. J. & Punt, P. J. (1991) “Gene transfer systems and vector development for filamentous fungi, in: Applied Molecular Genetics of Fungi, J. F. Peberdy et al., eds., S. 1-28, Cambridge University Press: Cambridge.

[0103] Baculovirus vectors which are available for the expression of proteins in cultivated insect cells (for example Sf9 cells) comprise the pAc series (Smith et al., (1983) Mol. Cell. Biol. 3:2156-2165) and the pVL series (Lucklow and Summers, (1989) Virology 170:31-39).

[0104] Plant expression vectors, such as those described in detail in: Becker, D., Kemper, E., Schell, J. and Masterson, R. (1992) “New plant binary vectors with selectable markers located proximal to the left border”, Plant Mol. Biol. 20:1195-1197; and Bevan, M. W. (1984) “Binary Agrobacterium vectors for plant transformation”, Nucl. Acids Res. 12:8711-8721.

[0105] Mammal expression vectors, such as pCDM8 (Seed, B. (1987) Nature 329:840) and pMT2PC (Kaufman et al. (1987) EMBO J. 6:187-195).

[0106] Further suitable expression systems for prokaryotic and eukaryotic cells are described in chapter 16 and 17 by Sambrook, J., Fritsch, E. F. and Maniatis, T., Molecular cloning: A Laboratory Manual, 2nd edition, Cold Spring Harbor Laboratory, Cold Spring Harbor Laboratory Press, Cold Spring Harbor, N.Y., 1989.

### 3.3.4 Recombinant Microorganisms:

[0107] With the aid of the vectors according to the invention it is possible to prepare recombinant microorganisms which are transformed, for example, with at least one vector according to the invention and can be used for producing the polypeptides according to the invention. The abovedescribed recombinant constructs according to the invention are advantageously introduced into a suitable host system and expressed. In this context, preference is given to using customary cloning and transfection methods known to the person skilled in the art such as, for example, coprecipitation, protoplast fusion, electroporation, retroviral transfection and the like, in order to express said nucleic acids in the particular expression system. Suitable systems are described, for example, in Current Protocols in Molecular Biology, F. Ausubel et al., ed., Wiley Interscience, New York 1997, or Sambrook et al., Molecular Cloning: A Laboratory Manual. 2nd edition, Cold Spring Harbor Laboratory, Cold Spring Harbor Laboratory Press, Cold Spring Harbor, N.Y., 1989.

[0108] According to the invention, it is also possible to prepare homologously recombinant microorganisms. For this, a vector is prepared which comprises at least one section of a gene according to the invention or of a coding sequence, into which, if appropriate, at least one amino acid deletion, addition or substitution has been introduced in order to modify, for example to functionally disrupt, the sequence according to the invention (“knockout” vector). The introduced sequence may, for example, also be a homolog from a related microorganism or be derived from a mammalian, yeast or insect source. Alternatively, the vector used for homologous recombination may be designed such that the endogenous gene is mutated or otherwise modified upon homologous recombination, while still encoding the functional protein (for example the upstream regulatory region may be modified in such a way that, as a result, the expression of the endogenous protein is modified). The modified section of the gene according to the invention is in the homologous recombination vector. The construction of suitable vectors for homologous recombination is described, for example, in Thomas, K. R. and Capecchi, M. R. (1987) Cell 51:503.

[0109] Suitable host organisms are in principle all organisms which permit an expression of the nucleic acids according to the invention, their allelic variants, their functional equivalents or derivatives. Host organisms are to be understood as meaning, for example, bacteria, fungi, yeasts, plant or animal cells. Preferred organisms are bacteria, such as those of the genera Escherichia, such as, for example, Escherichia coli, Streptomyces, Bacillus or Pseudomonas, eukaryotic microorganisms, such as Saccharomyces cerevisiae, Aspergillus, higher eukaryotic cells from animals or plants, for example Sf9 or CHO cells.

[0110] The selection of successfully transformed organisms can take place by marker genes which are likewise present in the vector or in the expression cassette. Examples of such marker genes are genes for antibiotic resistance and for enzymes which catalyze a color-imparting reaction, which results in staining of the transformed cell. These can then be selected by automatic cell sorting. Microorganisms that have been successfully transformed with a vector and carry an appropriate antibiotic resistance gene (e.g. G418 or hygromycin) can be selected by appropriate antibiotic-comprising media or nutrient media. Marker proteins present on the cell surface can be used for selection by means of affinity chromatography.

[0111] As alternative preparation methods for sequences according to the invention, reference may be made to the chemical synthesis methods known per se, such as solid-phase synthesis or liquid-phase synthesis.

### 3.4 Recombinant Preparation of the Polypeptides:

[0112] The peptides used according to the invention can be prepared using recombinant techniques in a manner known per se, where a microorganism producing polypeptides is cultivated, if appropriate the expression of the polypeptides is induced and these are isolated from the culture. The polypeptides can also be produced on an industrial scale in this way if desired.

[0113] The recombinant microorganism can be cultured and fermented by known methods. Bacteria can be replicated, for example, in TB or LB medium and at a temperature of from 20 to 40° C. and a pH of from 6 to 9. Suitable culturing conditions are described in detail, for example, in T. Maniatis, E. F. Fritsch and J. Sambrook, Molecular Cloning: A Laboratory Manual, Cold Spring Harbor Laboratory, Cold Spring Harbor, N.Y. (1989).

[0114] If the polypeptides are not secreted into the culture medium, the cells are then disrupted and the product is obtained from the lysate by known protein isolation methods. The cells may alternatively be disrupted by high-frequency ultrasound, by high pressure, such as, for example, in a French pressure cell, by osmolysis, by the action of detergents, lytic enzymes or organic solvents, by homogenizers or by a combination of two or more of the methods listed.

[0115] The polypeptides can be purified by known chromatographic methods, such as molecular sieve chromatography (gel filtration), such as Q-Sepharose chromatography, ion exchange chromatography and hydrophobic chromatography, and by other customary methods, such as ultrafiltration, crystallization, salting out, dialysis and native gel electrophoresis. Suitable methods are described, for example, in Cooper, F. G., Biochemische Arbeitsmethoden, Verlag Walter de Gruyter, Berlin, New York or in Scopes, R., Protein Purification, Springer Verlag, New York, Heidelberg, Berlin.

[0116] It is particularly advantageous for isolation of the recombinant protein to use vector systems or oligonucleotides which extend the cDNA by specific nucleotide sequences and thus code for modified polypeptides or fusion proteins which serve, for example, for simpler purification. Suitable modifications of this type are, for example, so-called “tags” which act as anchors, such as, for example, the modification known as hexa-histidine anchor, or epitopes which can be recognized as antigens of antibodies (described, for example, in Harlow, E. and Lane, D., 1988, Antibodies: A Laboratory Manual. Cold Spring Harbor (N.Y.) Press). These anchors can be used to attach the proteins to a solid support, such as, for example, a polymer matrix which can, for example, be packed in a chromatography column, or can be used on a microtiter plate or another support.

[0117] These anchors can at the same time also be used for recognizing the proteins. Moreover, for recognizing the proteins, it is also possible to use customary markers, such as fluorescent dyes, enzyme markers which form a detectable reaction product following reaction with a substrate, or radioactive labels, alone or in combination with the anchors for derivatizing the proteins.

### 3.5 Embodiments of Compositions According to the Invention

### 3.5.1 General Fields of Application and Formulations

[0118] The antimicrobial peptides according to the invention have a broad field of application in human cosmetics, in particular skincare and haircare, and also animal care, but can also be used pharmacologically.

[0119] The cosmetic compositions according to the invention are in particular skin cosmetic, nail cosmetic, hair cosmetic, dermatological, hygiene or pharmaceutical compositions. In particular, the antimicrobial peptides according to the invention are used for skin cosmetics, nail cosmetics and/or hair cosmetics or as oral care compositions. They permit the growth inhibition of undesired microorganisms which cause damage to hair and to skin, e.g. dandruff formation, to nails, e.g. increased nail brittleness, thickened nails, or which cause itching or burning.

[0120] According to a further embodiment, hair cosmetic or skin cosmetic preparations according to the invention serve in particular for the care or the protection of the skin or of the hair and are in the form of an emulsion, a dispersion, a suspension, an aqueous surfactant preparation, a milk, a lotion, a cream, a balsam, an ointment, a gel, granules, a powder, a stick preparation, such as, for example, a lipstick, a foam, an aerosol or a spray. Such formulations are highly suited to topical preparations. Suitable emulsions are oil-in-water emulsions and water-in-oil emulsions or microemulsions.

[0121] As a rule, the hair cosmetic or skin cosmetic preparation is used for application to the skin (topically) or to the hair. In this connection, “topical preparations” are to be understood as meaning those preparations which are suitable for applying the active ingredients to the skin in fine distribution. Of suitability for this purpose are, for example, aqueous and aqueous-alcoholic solutions, sprays, foams, foam aerosols, ointments, aqueous gels, emulsions of the O/W or W/O type, microemulsions or cosmetic stick preparations.

[0122] According to one embodiment of the cosmetic composition according to the invention, it comprises a carrier. Preferred carriers are water, a gas, a water-based liquid, an oil, a gel, an emulsion or microemulsion, a dispersion or a mixture thereof. Said carriers exhibit good skin compatibility. Aqueous gels, emulsions or microemulsions are particularly advantageous for topical preparations.

[0123] Besides customary additives and auxiliaries, the cosmetic compositions according to the invention can additionally comprise cosmetically and/or dermatologically active ingredients.

[0124] Examples of suitable further active ingredients are:

[0125] Suitable cosmetically and/or dermatologically active ingredients are, for example, coloring active ingredients, skin and hair pigmentation agents, tinting agents, tanning agents, bleaches, keratin-hardening substances, antimicrobial active ingredients, photofilter active ingredients, repellent active ingredients, hyperemic substances, keratolytically and keratoplastically effective substances, antidandruff active ingredients, antiphlogistics, keratinizing substances, antioxidative active ingredients and active ingredients that act as free-radical scavengers, substances which moisturize the skin or keep the skin moisturized, refatting active ingredients, antierythimatous or antiallergic active ingredients, branched fatty acids, such as 18-methyleicosanoic acid, and mixtures thereof.

[0126] Artificially skin-tanning active ingredients which are suitable for tanning the skin without natural or artificial irradiation with UV rays; these are, for example, dihydroxyacetone, alloxan and walnut shell extract. Suitable keratin-hardening substances are generally active ingredients which can also be used as antiperspirants, such as, for example, potassium aluminum sulfate, aluminum hydroxychloride, aluminum lactate, etc.

[0127] Antimicrobial active ingredients which are used in order to destroy microorganisms or to inhibit their growth. They thus serve both as preservatives and as deodorizing substance which reduces the formation or the intensity of body odor. These include, for example, customary preservatives known to the person skilled in the art, such as p-hydroxybenzoic acid esters, imidazolinylurea, formaldehyde, sorbic acid, benzoic acid, salicylic acid etc. Such deodorizing substances are, for example, zinc ricinoleate, triclosan, undecylenic acid alkylolamides, triethyl citrate, chlorhexidin etc.

[0128] Suitable auxiliaries and additives for the production of hair cosmetic, nail cosmetic or skin cosmetic preparations are familiar to the person skilled in the art and can be found in handbooks on cosmetics, for example Schrader, Grundlagen and Rezepturen der Kosmetika [Fundamentals and formulations of cosmetics], Hüthig Verlag, Heidelberg, 1989, ISBN 3-7785-1491-1. The auxiliaries and additives are preferably cosmetically and/or pharmaceutically acceptable auxiliaries. Of pharmaceutical acceptability are the auxiliaries known for use in the field of pharmacy, food technology and related fields, in particular those listed in the relevant pharmacopeia (e.g. DAB, Ph. Eur., BP, NF), and other auxiliaries whose properties do not preclude a physiological application.

[0129] Suitable auxiliaries may be: lubricants, wetting agents, emulsifying and suspending agents, preservatives, antioxidants, antiirritatives, chelating agents, emulsion stabilizers, film formers, gel formers, odor masking agents, hydrocolloids, solvents, solubility promoters, neutralizers, permeation accelerators, pigments, quaternary ammonium compounds, refatting and superfatting agents, ointment, cream or oil base substances, silicone derivatives, stabilizers, sterilants, propellants, drying agents, opacifiers, thickeners, waxes, softeners, white oil. An embodiment in this regard is based on technical knowledge, as presented, for example, in Fiedler, H. P. Lexikon der Hilfsstoffe für Pharmazie, Kosmetik and angrenzende Gebiete [Lexicon of auxiliaries for pharmacy, cosmetics and related fields], 4^{th} edition, Aulendorf: ECV-Editio-Kantor-Verlag, 1996.

[0130] Further suitable additives are selected from perfume oils, hair polymers, hair and skin conditioners, graft polymers, water-soluble or dispersible silicone-containing polymers, photoprotective agents, bleaches, care agents, colorants, tinting agents, tanning agents, dyes, consistency regulators, humectants, refatting agents, collagen, protein hydrolyzates, lipids, antioxidants, antifoams, antistatics, emollients, softeners, peroxide decomposers.

[0131] Specific examples of suitable auxiliaries and additives are (these may also be covalently or noncovalently bonded to the peptides according to the invention):
[0132] (1) Antioxidants selected from amino acids (e.g. glycine, histidine, tyrosine, tryptophan) and derivatives thereof, imidazoles (e.g. urocanic acid) and derivatives thereof, peptides such as D,L-carnosine, D-carnosine, L-carnosine and derivatives thereof (e.g. anserine), carotinoids, carotenes (e.g. β-carotene, lycopene) and derivatives thereof, chlorogenic acid and derivatives thereof, lipoic acid and derivatives thereof (e.g. dihydrolipoic acid), aurothioglucose, propylthiouracil and other thiols (e.g. thiorodoxin, glutathione, cysteine, cystine, cystamine and the glycosyl, N-acetyl, methyl, ethyl, propyl, amyl, butyl, and lauryl, palmitoyl, oleyl, γ-linoleyl, cholesteryl and glyceryl esters thereof) and salts thereof, dilauryl thiodipropionate, distearyl thiodipropionate, thiodipropionic acid and derivatives thereof (esters, ethers, peptides, lipids, nucleotides, nucleosides and salts), and sulfoximine compounds (e.g. buthionine sulfoximines, homocysteine sulfoximines, buthionine sulfones, penta-, hexa-, heptathionine sulfoximine), in particular in very low tolerated doses (e.g. pmol to μmol/kg range), also (metal) chelating agents (e.g. α-hydroxy fatty acids, palmitic acid, phytic acid, lactoferrin), α-hydroxy acids (e.g. citric acid, lactic acid, malic acid), humic acid, bile acid, bile extracts, bilirubin, biliverdin, EDTA and derivatives thereof, unsaturated fatty acids and derivatives thereof (e.g. γ-linolenic acid, linoleic acid, oleic acid), folic acid and derivatives thereof, ubiquinone and ubiquinol and derivatives thereof, vitamin C and derivatives thereof (e.g. sodium ascorbate, ascorbyl palmitate, Mg ascorbyl phosphate, ascorbyl acetate), tocopherol and derivatives (e.g. vitamin E acetate, tocotrienol), vitamin A and derivatives (vitamin A palmitate), and coniferyl benzoate of benzoin resin, rutinic acid and derivatives thereof, α-glycosylrutin, ferulic acid, furfurylideneglucitol, carnosine, butylhydroxytoluene, butylhydroxyanisole, nordihydroguaiacic acid, nordihydroguaiaretic acid, trihydroxybutyrophenone, uric acid and derivatives thereof, mannose and derivatives thereof, zinc and derivatives thereof (e.g. ZnO, ZnSO₄), selenium and derivatives thereof (e.g. selenomethionine), stilbenes and derivatives thereof (e.g. stilbene oxide, trans-stilbene oxide).
[0133] (2) Peroxide decomposers, i.e. compounds which are able to decompose peroxides, particularly preferably lipid peroxides. These are to be understood as including organic substances, such as, for example, pyridine-2-thiol-3-carboxylic acid, 2-methoxy-pyrimidinolcarboxylic acids, 2-methoxypyridinecarboxylic acids, 2-dimethylamino-pyrimidinolcarboxylic acids, 2-dimethylaminopyridinecarboxylic acids.
[0134] (3) Thickeners, such as crosslinked polyacrylic acids and derivatives thereof, polysaccharides and derivatives thereof, such as xanthan gum, agar agar, alginates or tyloses, cellulose derivatives, e.g. carboxymethylcellulose or hydroxycarboxymethylcellulose, fatty alcohols, monoglycerides and fatty acids, polyvinyl alcohol and polyvinylpyrrolidone. Preference is given to using nonionic thickeners.
[0135] (4) Preservatives which are listed below with their E numbers

| | |
|---|---|
| E 200 | Sorbic acid |
| E 201 | Sodium sorbate |
| E 202 | Potassium sorbate |
| E 203 | Calcium sorbate |
| E 210 | Benzoic acid |
| E 211 | Sodium benzoate |
| E 212 | Potassium benzoate |
| E 213 | Calcium benzoate |
| E 214 | Ethyl p-hydroxybenzoate |
| E 215 | Ethyl p-hydroxybenzoate Na salt |
| E 216 | n-Propyl p-hydroxybenzoate |
| E 217 | n-Propyl p-hydroxybenzoate Na salt |
| E 218 | Methyl p-hydroxybenzoate |
| E 219 | Methyl p-hydroxybenzoate Na salt |
| E 220 | Sulfur dioxide |
| E 221 | Sodium sulfite |
| E 222 | Sodium hydrogen sulfite |
| E 223 | Sodium disulfite |
| E 224 | Potassium disulfite |
| E 226 | Calcium sulfite |
| E 227 | Calcium hydrogensulfite |
| E 228 | Potassium hydrogensulfite |
| E 230 | Biphenyl (diphenyl) |
| E 231 | Orthophenylphenol |
| E 232 | Sodium |
| | orthophenylphenoxide |
| E 233 | Thiabendazole |
| E 235 | Natamycin |
| E 236 | Formic acid |
| E 237 | Sodium formate |
| E 238 | Calcium formate |
| E 239 | Hexamethylenetetramine |
| E 249 | Potassium nitrite |
| E 250 | Sodium nitrite |
| E 251 | Sodium nitrate |
| E 252 | Potassium nitrate |
| E 280 | Propionic acid |
| E 281 | Sodium propionate |
| E 282 | Calcium propionate |
| E 283 | Potassium propionate |
| E 290 | Carbon dioxide |

Also suitable according to the invention are preservatives or preservative auxiliaries customary in cosmetics, such as dibromodicyanobutane (2-bromo-2-bromomethyl-glutarodinitrile), 3-iodo-2-propynyl butylcarbamate, 2-bromo-2-nitropropane-1,3-diol, imidazolidinylurea, 5-chloro-2-methyl-4-isothiazolin-3-one, 2-chloroacetamide, benzalkonium chloride, benzyl alcohol, formaldehyde donors.

[0136] Also suitable as preservatives are phenyl hydroxyalkyl ethers, in particular the compound known under the name phenoxyethanol, on account of their bactericidal and fungicidal effects on a number of microorganisms.

[0137] Other antimicrobial agents are also likewise suitable for being incorporated into the preparations according to the invention. Advantageous substances are, for example, 2,4,4′-trichloro-2′-hydroxydiphenyl ether (irgasan), 1,6-di(4-chlorophenylbiguanido)-hexane (chlorhexidine), 3,4,4′-trichlorocarbanilide, quaternary ammonium compounds, oil of cloves, mint oil, thyme oil, triethyl citrate, farnesol (3,7,11-trimethyl-2,6,10-dodecatrien-14), and also the active ingredients and active ingredient combinations described in the patent laid-open specifications DE-37 40 186, DE-39 38 140, DE-42 04 321, DE-42 29 707, DE-43 09 372, DE-44 11 664, DE-195 41 967, DE-195 43 695, DE-195 43 696, DE-195 47 160, DE-196 02 108, DE-196 02 110, DE-196 02 111, DE-196 31 003, DE-196 31 004 and DE-196 34 019 and the patent specifications DE-42 29 737, DE-42 37 081, DE-43 24 219, DE-44 29 467, DE-44 23 410 and DE-195 16 705. Sodium hydrogencarbonate is also to be used advantageously. Antimicrobial polypeptides can likewise also be used.
[0138] (5) Photofilter active ingredients which absorbe UV rays in the UV-B and/or UV-A region. Suitable UV filters are, for example, 2,4,6-triaryl-1,3,5-triazines in which the aryl groups can in each case carry at least one substituent which is preferably selected from hydroxy, alkoxy, specifically methoxy, alkoxycarbonyl, specifically methoxycarbonyl and ethoxycarbonyl, and mixtures thereof. Also suitable are p-aminobenzoic acid esters, cinnamic acid esters, benzophenonones, camphor derivatives, and pigments that block UV rays, such as titanium dioxide, talc and zinc oxide.

[0139] Suitable UV filter substances are any desired UV-A and UV-B filter substances. Examples are:

| | | CAS No. |
|---|---|---|
| No. | Substance | (=acid) |
| 1 | 4-Aminobenzoic acid | 150-13-0 |
| 2 | 3-(4′-Trimethylammonium)benzylidenebornan-2-one methylsulfate | 52793-97-2 |
| 3 | 3,3,5-Trimethylcyclohexyl salicylate | 118-56-9 |
| | (homosalate) | |
| 4 | 2-Hydroxy-4-methoxybenzophenone | 131-57-7 |
| | (oxybenzone) | |
| 5 | 2-Phenylbenzimidazole-5-sulfonic acid and its potassium, | 27503-81-7 |
| | sodium and triethanolamine salts | |
| 6 | 3,3′-(1,4-Phenylenedimethine)bis(7,7-dimethyl- | 90457-82-2 |
| | 2-oxobicyclo[2.2.1]heptane-1-methanesulfonic acid) and its | |
| | salts | |
| 7 | Polyethoxyethyl 4-bis(polyethoxy)aminobenzoate | 113010-52-9 |
| 8 | 2-Ethylhexyl 4-dimethylaminobenzoate | 21245-02-3 |
| 9 | 2-Ethylhexyl salicylate | 118-60-5 |
| 10 | 2-Isoamyl 4-methoxycinnamate | 71617-10-2 |
| 11 | 2-Ethylhexyl 4-methoxycinnamate | 5466-77-3 |
| 12 | 2-Hydroxy-4-methoxybenzophenone-5-sulfonic acid | 4065-45-6 |
| | (sulisobenzone) and the sodium salt | |
| 13 | 3-(4′-Sulfobenzylidene)bornan-2-one and salts | 58030-58-6 |
| 14 | 3-Benzylidenebornan-2-one | 16087-24-8 |
| 15 | 1-(4′-Isopropylphenyl)-3-phenylpropane-1,3-dione | 63260-25-9 |
| 16 | 4-Isopropylbenzylsalicylate | 94134-93-7 |
| 17 | 3-Imidazol-4-ylacrylic acid and its ethyl ester | 104-98-3 |
| 18 | Ethyl 2-cyano-3,3-diphenylacrylate | 5232-99-5 |
| 19 | 2′-Ethylhexyl 2-cyano-3,3-diphenylacrylate | 6197-30-4 |
| 20 | Menthyl o-aminobenzoate or: | 134-09-8 |
| | 5-methyl-2-(1-methylethyl)-2-aminobenzoate | |
| 21 | Glyceryl p-aminobenzoate or: | 136-44-7 |
| | 1-glyceryl 4-aminobenzoate | |
| 22 | 2,2′-Dihydroxy-4-methoxybenzophenone (dioxybenzone) | 131-53-3 |
| 23 | 2-Hydroxy-4-methoxy-4-methylbenzophenone | 1641-17-4 |
| | (mexenone) | |
| 24 | Triethanolaminee salicylate | 2174-16-5 |
| 25 | Dimethoxyphenylglyoxalic acid or: | 4732-70-1 |
| | sodium 3,4-dimethoxyphenylglyoxalate | |
| 26 | 3-(4′Sulfobenzylidene)bornan-2-one and its salts | 56039-58-8 |
| 27 | 4-tert-Butyl-4′-methoxy-dibenzoylmethane | 70356-09-1 |
| 28 | 2,2′,4,4′-Tetrahydroxybenzophenone | 131-55-5 |
| 29 | 2,2′-Methylenebis[6-(2H-benzotriazol-2-yl)-4-(1,1,3,3,- | 103597-45-1 |
| | tetramethylbutyl)phenol] | |
| 30 | 2,2′-(1,4-Phenylene)bis-1H-benzimidazole-4,6- | 180898-37-7 |
| | disulfonic acid, Na salt | |
| 31 | 2,4-bis[4-(2-Ethylhexyloxy)-2-hydroxy]phenyl- | 187393-00-6 |
| | 6-(4-methoxyphenyl)(1,3,5)-triazine | |
| 32 | 3-(4-Methylbenzylidene)camphor | 36861-47-9 |
| 33 | Polyethoxyethyl 4-bis(polyethoxy)paraaminobenzoate | 113010-52-9 |
| 34 | 2,4-Dihydroxybenzophenone | 131-56-6 |
| 35 | 2,2′-Dihydroxy-4,4′-dimethoxybenzophenone-5,5′- | 3121-60-6 |
| | disodium sulfonate | |
| 36 | 2-[4-(Diethylamino)-2-hydroxybenzoyl]hexyl benzoate | 302776-68-7 |
| 37 | 2-(2H-Benzotriazol-2-yl)-4-methyl-6-[2-methyl-3-[1,3,3,3- | 155633-54-8 |
| | tetramethyl-1-[(trimethylsilyl)oxy]disiloxanyl]propyl]phenol | |
| 38 | 1,1-[(2,2′-Dimethylpropoxy)carbonyl]-4,4-diphenyl-1,3- | 363602-15-7 |
| | butadiene | |

[0140] Furthermore, the cosmetic and dermatological preparations according to the invention can advantageously comprise inorganic pigments which block UV rays and are based on metal oxides and/or other metal compounds that are insoluble or sparingly soluble in water selected from the group of the oxides of zinc (ZnO), titanium (TiO₂), iron (e.g. Fe₂O₃), zirconium (ZrO₂), silicon (SiO₂), manganese (e.g. MnO), aluminum (Al₂O₃), cerium (e.g. Ce₂O₃), mixed oxides of the corresponding metals and mixtures of such oxides.

[0141] The inorganic pigments here may be present in coated form, i.e. be surface-treated. This surface treatment can, for example, consist in providing the pigments with a thin hydrophobic layer by the method known per se, as described in DE-A-33 14 742.
[0142] (6) Repellent active ingredients, i.e. compounds which are able to keep away or drive away certain animals, in particular insects, from people. These include, for example, 2-ethyl-1,3-hexanediol, N,N-diethyl-m-toluamide etc. Suitable hyperemic substances, which stimulate blood flow through the skin, are, for example, essential oils, such as dwarf-pine needle extract, lavender extract, rosemary extract, juniper berry extract, horse chestnut extract, birch leaf extract, hay flower extract, ethyl acetate, camphor, menthol, peppermint oil, rosemary extract, eucalyptus oil etc. Suitable keratolytic and keratoplastic substances are, for example, salicylic acid, calcium thioglycolate, thioglycolic acid and its salts, sulfur etc. Suitable antidandruff active ingredients are, for example, sulfur, sulfur polyethylene glycol sorbitan monooleate, sulfur ricinol polyethoxylate, zinc pyrithione, aluminum pyrithione etc. Suitable antiphlogistics, which counteract skin irritations, are, for example, allantoin, bisabolol, dragosantol, camomile extract, panthenol etc.
[0143] (7) Cosmetically or pharmaceutically acceptable polymers, such as cationic, amphoteric and neutral polymers.

[0144] Suitable polymers are, for example, cationic polymers with the INCl name Polyquaternium, e.g. copolymers of vinylpyrrolidone/N-vinylimidazolium salts (Luviquat FC, Luviquat HM, Luviquat MS, Luviquat, Care), copolymers of N-vinylpyrrolidone/dimethylaminoethyl methacrylate, quaternized with diethyl sulfate (Luviquat PQ 11), copolymers of N-vinylcaprolactam/N-vinylpyrrolidone/N-vinyl-imidazolium salts (Luviquat E Hold), cationic cellulose derivatives (Polyquaternium-4 and -10), acrylamido copolymers (Polyquaternium-7) and chitosan.

[0145] Suitable cationic (quaternized) polymers are also Merquat (polymer based on dimethyldiallylammonium chloride), Gafquat (quaternary polymers which are formed by the reaction of polyvinylpyrrolidone with quaternary ammonium compounds), polymer JR (hydroxyethylcellulose with cationic groups) and cationic polymers based on plants, e.g. guar polymers, such as the Jaguar grades from Rhodia.

[0146] Further suitable polymers are also neutral polymers, such as polyvinylpyrrolidones, copolymers of N-vinylpyrrolidone and vinyl acetate and/or vinyl propionate, polysiloxanes, polyvinylcaprolactam and other copolymers with N-vinylpyrrolidone, polyethyleneimines and salts thereof, polyvinylamines and salts thereof, cellulose derivatives, polyaspartic acid salts and derivatives thereof. These include, for example, Luviflex® Swing (partially saponified copolymer of polyvinyl acetate and polyethylene glycol, BASF).

[0147] Suitable polymers are also nonionic, water-soluble or water-dispersible polymers or oligomers, such as polyvinylcaprolactam, e.g. Luviskol® Plus (BASF), or polyvinylpyrrolidone and copolymers thereof, in particular with vinyl esters, such as vinyl acetate, e.g. Luviskol® VA 37 (BASF), polyamides, e.g. based on itaconic acid and aliphatic diamines, as are described, for example, in DE-A-43 33 238.

[0148] Suitable polymers are also amphoteric or zwitterionic polymers, such as the octylacrylamide/methyl methacrylate/tert-butylaminoethyl methacrylate-hydroxypropyl methacrylate copolymers obtainable under the names Amphomer (National Starch), and also zwitterionic polymers as are disclosed, for example, in the German patent applications DE 39 29 973, DE 21 50 557, DE 28 17 369 and DE 37 08 451. Acrylamidopropyltrimethylammonium chloride/acrylic acid or methacrylic acid copolymers and the alkali metal and ammonium salts thereof are preferred zwitterionic polymers. Furthermore, suitable zwitterionic polymers are methacroylethyl-betaine/methacrylate copolymers, which are commercially available under the name Amersette (AMERCHOL), and copolymers of hydroxyethyl methacrylate, methyl methacrylate, N,N-dimethylaminoethyl methacrylate and acrylic acid (Jordapon (D)).

[0149] Suitable polymers are also nonionic, siloxane-containing, water-soluble or dispersible polymers, e.g. polyether siloxanes, such as Tegopren (Goldschmidt) and Besi (Wacker).

3.5.2 Particular compositions according to the invention

[0150] According to a preferred embodiment, the compositions according to the invention are a skin or hair cleaning composition.

[0151] Preferred skin or hair cleaning compositions are soaps of liquid to gel-like consistency, such as transparent soaps, luxury soaps, deodorant soaps, cream soaps, baby soaps, skin protection soaps, abrasive soaps and syndets, pasty soaps, soft soaps and washing pastes, peeling soaps, wet wipes, liquid washing, shower and bathing preparations, such as washing lotions, shower baths and shower gels, foam baths, oil baths and scrub preparations, shaving foams, shaving lotions and shaving creams.

[0152] According to a further preferred embodiment, the compositions according to the invention are a shower gel, a shampoo formulation or a bathing preparation. Such formulations comprise at least one antimicrobial peptide and usually anionic surfactants as base surfactants and amphoteric and/or nonionic surfactants as cosurfactants. Further suitable active ingredients and/or auxiliaries are generally selected from lipids, perfume oils, dyes, organic acids, preservatives and antioxidants, and also thickeners/gel formers, skin conditioners and humectants.

### i) Specific Embodiments for Compositions for Applying to the Skin:

[0153] Suitable skin cosmetic compositions are, for example, face tonics, face masks, deodorants and other cosmetic lotions. Compositions for use in decorative cosmetics comprise, for example, concealing sticks, stage make-up, mascara and eye shadows, lipsticks, kohl pencils, eyeliners, blushers, powders and eyebrow pencils.

[0154] Furthermore, the dermatological agents according to the invention can be used in nose-strips for pore cleansing, in antiacne compositions, repellents, shaving compositions, aftershave and preshave care compositions, aftersun care compositions, hair removal compositions, hair colorants, intimate care compositions, foot care compositions and in babycare.

[0155] The skincare compositions according to the invention are in particular W/O or O/W skin creams, day and night creams, eye creams, face creams, antiwrinkle creams, sunscreen creams, moisturizing creams, bleaching creams, self-tanning creams, vitamin creams, skin lotions, care lotions and moisturizing lotions.

[0156] Skin cosmetic and dermatological compositions preferably comprise at least one peptide in an amount of from about 0.0001 to 50% by weight, preferably 0.001 to 10% by weight, very particularly preferably 0.0057 to 0.1% by weight, based on the total weight of the composition.

[0157] Depending on the field of application, the skin cosmetic compositions according to the invention can be applied in a form suitable for skincare, such as, for example, as cream, foam, gel, stick, mousse, milk, spray (pump spray or propellant-containing spray).

[0158] Besides the peptides according to the invention and suitable carriers, the skin cosmetic preparations can also comprise further active ingredients and auxiliaries customary in skin cosmetics, as described previously. These include, preferably, emulsifiers, preservatives, perfume oils, cosmetic active ingredients, such as phytantriol, vitamin A, E and C, retinol, bisabolol, panthenol, photoprotective agents, bleaches, colorants, tinting agents, tanning agents, collagen, enzymes, protein hydrolyzates, stabilizers, pH regulators, dyes, salts, thickeners, gel formers, consistency regulators, silicones, humectants, refatting agents and further customary additives.

[0159] Preferred oil and fat components of the skin cosmetic and dermatological compositions are the abovementioned mineral and synthetic oils, such as, for example, paraffins, silicone oils and aliphatic hydrocarbons with more than 8 carbon atoms, animal and vegetable oils, such as, for example, sunflower oil, coconut oil, avocado oil, olive oil, lanolin, or waxes, fatty acids, fatty acid esters, such as, for example, triglycerides of C₆-C₃₀-fatty acids, wax esters, such as, for example, jojoba oil, fatty alcohols, vaseline, hydrogenated lanolin and acetylated lanolin, and mixtures thereof.

[0160] To establish certain properties, such as, for example, improving the feel to the touch, the spreading behavior, the water resistance and/or the binding of active ingredients and auxiliaries, such as pigments, the skin cosmetic and dermatological preparations can additionally also comprise conditioning substances based on silicone compounds. Suitable silicone compounds are, for example, polyalkylsiloxanes, polyarylsiloxanes, polyarylalkylsiloxanes, polyether siloxanes or silicone resins.

[0161] The cosmetic or dermatological preparations are produced in accordance with customary methods known to the person skilled in the art.

[0162] To produce the dermatological compositions according to the invention, the active ingredients can be mixed or diluted with a suitable auxiliary (excipient). Excipients can be solid, semisolid or liquid materials which can serve as vehicles, carriers or medium for the active ingredient. The admixing of further auxiliaries takes place if desired in the manner known to the person skilled in the art. Furthermore, the polymers and dispersions are suitable as auxiliaries in pharmacy, preferably as or in (a) coating(s) or (a) binder(s) for solid drug forms. They can also be used in creams and as tablet coatings and tablet binders.

[0163] Preferably, the cosmetic and dermatological compositions are present in the form of emulsions, in particular as water-in-oil (W/O) or oil-in-water (O/W) emulsions. However, it is also possible to choose other types of formulation, for example gels, oils, oleogels, multiple emulsions, for example in the form of W/O/W or O/W/O emulsions, anhydrous ointments or ointment bases etc. Emulsifier-free formulations such as hydrodispersions, hydrogels or a Pickering emulsion are also advantageous embodiments.

[0164] The preparation of emulsions takes place by known methods. Besides at least one peptide according to the invention, the emulsions generally comprise customary constituents, such as fatty alcohols, fatty acid esters and in particular fatty acid triglycerides, fatty acids, lanolin and derivatives thereof, natural or synthetic oils or waxes and emulsifiers in the presence of water. The selection of additives specific to the type of emulsion and the preparation of suitable emulsions is described, for example, in Schrader, Grundlagen and Rezepturen der Kosmetika [Fundamentals and formulations of cosmetics], Hüthig Buch Verlag, Heidelberg, 2nd edition, 1989, third part, to which reference is hereby expressly made.

[0165] A suitable emulsion as W/O emulsion, e.g. for a skin cream etc., generally comprises an aqueous phase which is emulsified in an oil or fatty phase by means of a suitable emulsifier system. A polyelectrolyte complex can be used for producing the aqueous phase.

[0166] Preferred fatty components which may be present in the fatty phase of the emulsions are: hydrocarbon oils, such as paraffin oil, Purcellin oil, perhydrosqualene and solutions of microcrystalline waxes in these oils; animal or vegetable oils, such as sweet almond oil, avocado oil, calophylum oil, lanolin and derivatives thereof, castor oil, sesame oil, olive oil, jojoba oil, karite oil, hoplostethus oil, mineral oils whose distillation start under atmospheric pressure is at about 250° C. and whose distillation end point is at 410° C., such as, for example, vaselin oil, esters of saturated or unsaturated fatty acids, such as alkyl myristates, e.g. isopropyl, butyl or cetyl myristate, hexadecyl stearate, ethyl or isopropyl palmitate, octanoic acid or decanoic acid triglycerides and cetyl ricinoleate.

[0167] The fatty phase can also comprise silicone oils that are soluble in other oils, such as dimethylpolysiloxane, methylphenylpolysiloxane and the silicone glycol copolymer, fatty acids and fatty alcohols.

[0168] Besides the peptides according to the invention, it is also possible to use waxes, such as, for example, carnauba wax, candelilla wax, beeswax, microcrystalline wax, ozokerite wax and Ca, Mg and Al oleates, myristates, linoleates and stearates.

[0169] Furthermore, an emulsion according to the invention can be in the form of an O/W emulsion. Such a type of emulsion usually comprises an oil phase, emulsifiers which stabilize the oil phase in the water phase, and an aqueous phase, which is usually present in thickened form. Suitable emulsifiers are preferably O/W emulsifiers, such as polyglycerol esters, sorbitan esters or partially esterified glycerides.

[0170] According to a further preferred embodiment, the compositions according to the invention are a shower gel, a shampoo formulation or a bathing preparation.

[0171] Such formulations comprise at least one peptide according to the invention and usually anionic surfactants as base surfactants and amphoteric and/or nonionic surfactants as cosurfactants. Further suitable active ingredients and/or auxiliaries are generally selected from lipids, perfume oils, dyes, organic acids, preservatives and antioxidants, and thickeners/gel formers, skin conditioners and moisturizers.

[0172] These formulations comprise preferably 2 to 50% by weight, preferably 5 to 40% by weight, particularly preferably 8 to 30% by weight, of surfactants, based on the total weight of the formulation.

[0173] All anionic, neutral, amphoteric or cationic surfactants customarily used in body cleaning compositions can be used in the washing, showering and bathing preparations.

[0174] Suitable anionic surfactants are, for example, alkyl sulfates, alkyl ether sulfates, alkylsulfonates, alkylarylsulfonates, alkyl succinates, alkyl sulfosuccinates, N-alkoyl sarcosinates, acyl taurates, acyl isothionates, alkyl phosphates, alkyl ether phosphates, alkyl ether carboxylates, alpha-olefinsulfonates, in particular the alkali metal and alkaline earth metal salts, e.g. sodium, potassium, magnesium, calcium, and also ammonium and triethanolamine salts. The alkyl ether sulfates, alkyl ether phosphates and alkyl ether carboxylates can have between 1 and 10 ethylene oxide or propylene oxide units, preferably 1 to 3 ethylene oxide units, in the molecule.

[0175] These include, for example, sodium lauryl sulfate, ammonium lauryl sulfate, sodium lauryl ether sulfate, ammonium lauryl ether sulfate, sodium lauryl sarcosinate, sodium oleyl succinate, ammonium lauryl sulfosuccinate, sodium dodecylbenzenesulfonate, triethanolamine dodecylbenzenesulfonate.

[0176] Suitable amphoteric surfactants are, for example, alkylbetaines, alkylamidopropylbetaines, alkylsulfobetaines, alkyl glycinates, alkyl carboxyglycinates, alkyl amphoacetates or -propionates, alkyl amphodiacetates or -dipropionates.

[0177] For example, cocodimethylsulfopropylbetaine, laurylbetaine, cocamidopropylbetaine or sodium cocamphopropionate can be used.

[0178] Suitable nonionic surfactants are, for example, the reaction products of aliphatic alcohols or alkylphenols having 6 to 20 carbon atoms in the alkyl chain, which may be linear or branched, with ethylene oxide and/or propylene oxide. The amount of alkylene oxide is about 6 to 60 moles per mole of alcohol. Also suitable are alkylamine oxides, mono- or dialkylalkanolamines, fatty acid esters of polyethylene glycols, ethoxylated fatty acid amides, alkyl polyglycosides or sorbitan ether esters.

[0179] Furthermore, the washing, showering and bathing preparations can comprise customary cationic surfactants, such as, for example, quaternary ammonium compounds, for example cetyltrimethylammonium chloride.

[0180] Furthermore, the shower gel/shampoo formulations can comprise thickeners, such as, for example, sodium chloride PEG-55, propylene glycol oleate, PEG-120 methylglucose dioleate and others, and also preservatives, further active ingredients and auxiliaries and water.

### ii) Specific Embodiments for Hair Treatment Compositions

[0181] According to a further preferred embodiment, the compositions according to the invention are a hair treatment composition.

[0182] Hair treatment compositions according to the invention comprise preferably at least one peptide according to the invention in an amount in the range from about 0.0001 to 50% by weight, preferably 0.001 to 10% by weight, particularly preferably 0.0057 to 0.1% by weight, based on the total weight of the composition.

[0183] Preferably, the hair treatment compositions according to the invention are in the form of a setting foam, hair mousse, hair gel, shampoo, hairspray, hair foam, end fluid, neutralizer for permanent waves, hair colorant and bleach or “hot-oil treatment”. Depending on the field of use, the hair cosmetic preparations can be applied as (aerosol) spray, (aerosol) foam, gel, gel spray, cream, lotion or wax. Hairsprays here comprise both aerosol sprays and also pump sprays without propellant gas. Hair foams comprise both aerosol foams and also pump foams without propellant gas. Hairsprays and hair foams comprise preferably predominantly or exclusively water-soluble or water-dispersible components. If the compounds used in the hairsprays and hair foams according to the invention are water-dispersible, they can be applied in the form of aqueous microdispersions with particle diameters of usually 1 to 350 nm, preferably 1 to 250 nm. The solids contents of these preparations are usually in a range from about 0.5 to 20% by weight. These microdispersions generally require no emulsifiers or surfactants for their stabilization.

[0184] The hair cosmetic formulations according to the invention comprise, in a preferred embodiment, a) 0.0001 to 50% by weight of at least one peptide according to the invention, b) 20 to 99.95% by weight of water and/or alcohol, c) 0 to 50% by weight of at least one propellant gas, d) 0 to 5% by weight of at least one emulsifier, e) 0 to 3% by weight of at least one thickener, and also up to 25% by weight of further constituents.

[0185] Alcohol is to be understood as meaning all alcohols customary in cosmetics, for example ethanol, isopropanol, n-propanol.

[0186] Also included here are all styling and conditioner polymers known in cosmetics which can be used in combination with the peptides according to the invention if quite specific properties are to be set.

[0187] Suitable conventional hair cosmetics polymers are, for example, the aforementioned cationic, anionic, neutral, nonionic and amphoteric polymers, to which reference is hereby made.

[0188] To establish certain properties, the preparations can additionally also comprise conditioning substances based on silicone compounds. Suitable silicone compounds are, for example, polyalkylsiloxanes, polyarylsiloxanes, polyarylalkylsiloxanes, polyether siloxanes, silicone resins or dimethicone copolyols (CTFA) and aminofunctional silicone compounds, such as amodimethicones (CTFA).

[0189] The polymers according to the invention are suitable in particular as setting agents in hairstyling preparations, in particular hairsprays (aerosol sprays and pump sprays without propellant gas) and hair foams (aerosol foams and pump foams without propellant gas).

[0190] In a preferred embodiment, spray preparations comprise a) 0.0001 to 50% by weight of at least one polypeptide according to the invention, b) 20 to 99.9% by weight of water and/or alcohol, c) 0 to 70% by weight of at least one propellant, d) 0 to 20% by weight of further constituents.

[0191] Propellants are the propellants customarily used for hairsprays or aerosol foams. Preference is given to mixtures of propane/butane, pentane, dimethyl ether, 1,1-difluoroethane (HFC-152 a), carbon dioxide, nitrogen or compressed air.

[0192] A formulation for aerosol hair foams preferred according to the invention comprises a) 0.0001 to 50% by weight of at least one peptide according to the invention, b) 55 to 99.8% by weight of water and/or alcohol, c) 5 to 20% by weight of a propellant, d) 0.1 to 5% by weight of an emulsifier, e) 0 to 10% by weight of further constituents.

[0193] Emulsifiers that can be used are all emulsifiers customarily used in hair foams. Suitable emulsifiers may be nonionic, cationic or anionic or amphoteric.

[0194] Examples of nonionic emulsifiers (INCl nomenclature) are laureths, e.g. laureth-4; ceteths, e.g. cetheth-1, polyethylene glycol cetyl ether, ceteareths, e.g. cetheareth-25, polyglycol fatty acid glycerides, hydroxylated lecithin, lactyl esters of fatty acids, alkyl polyglycosides.

[0195] Examples of cationic emulsifiers are cetyldimethyl-2-hydroxyethylammonium dihydrogenphosphate, cetyltrimonium chloride, cetyltrimmonium bromide, cocotrimonium methyl sulfate, quaternium-1 to x (INCl).

[0196] Anionic emulsifiers can be selected, for example, from the group of alkyl sulfates, alkyl ether sulfates, alkylsulfonates, alkylarylsulfonates, alkyl succinates, alkyl sulfosuccinates, N-alkoyl sarcosinates, acyl taurates, acyl isethionates, alkyl phosphates, alkyl ether phosphates, alkyl ether carboxylates, alpha-olefinsulfonates, in particular the alkali metal and alkaline earth metal salts, e.g. sodium, potassium, magnesium, calcium, and also ammonium and triethanolamine salts. The alkyl ether sulfates, alkyl ether phosphates and alkyl ether carboxylates can have between 1 and 10 ethylene oxide or propylene oxide units, preferably 1 to 3 ethylene oxide units, in the molecule.

[0197] A preparation suitable according to the invention for styling gels can, for example, have the following composition: a) 0.0001 to 50% by weight of at least one peptide according to the invention, b) 80 to 99.85% by weight of water and/or alcohol, c) 0 to 3% by weight, preferably 0.05 to 2% by weight, of a gel former, d) 0 to 20% by weight of further constituents.

[0198] The use of gel formers may be advantageous in order to set specific rheological or other application properties of the gels. Gel formers that can be used are all gel formers customary in cosmetics. These include lightly crosslinked polyacrylic acid, for example carbomer (INCl), cellulose derivatives, e.g. hydroxypropylcellulose, hydroxyethylcellulose, cationically modified celluloses, polysaccharides, e.g. xanthan gum, caprylic/capric triglyceride, sodium acrylate copolymers, polyquaternium-32 (and) paraffinum liquidum (INCl), sodium acrylate copolymers (and) paraffinum liquidum (and) PPG-1 trideceth-6, acrylamidopropyltrimonium chloride/acrylamide copolymers, steareth-10 allyl ether, acrylate copolymers, polyquaternium-37 (and) paraffinum liquidum (and) PPG-1 trideceth-6, polyquaternium 37 (and) propylene glycol dicaprate dicaprylate (and) PPG-1 trideceth-6, polyquaternium-7, polyquaternium-44.

[0199] A preparation comprising the peptides according to the invention can preferably be used in shampoo formulations as antidandruff agent. Preferred shampoo formulations comprise a) 0.0001 to 50% by weight of at least one peptide according to the invention, b) 25 to 94.95% by weight of water, c) 5 to 50% by weight of surfactants, c) 0 to 5% by weight of a further conditioner, d) 0 to 10% by weight of further cosmetic constituents.

[0200] All anionic, neutral, amphoteric or cationic surfactants customarily used in shampoos can be used in the shampoo formulations.

[0201] Suitable anionic surfactants are, for example, alkyl sulfates, alkyl ether sulfates, alkylsulfonates, alkylarylsulfonates, alkyl succinates, alkyl sulfosuccinates, N-alkoyl sarcosinates, acyl taurates, acyl isothionates, alkyl phosphates, alkyl ether phosphates, alkyl ether carboxylates, alpha-olefinsulfonates, in particular the alkali metal and alkaline earth metal salts, e.g. sodium, potassium, magnesium, calcium, and ammonium and triethanolamine salts. The alkyl ether sulfates, alkyl ether phosphates and alkyl ether carboxylates can have between 1 and 10 ethylene oxide or propylene oxide units, preferably 1 to 3 ethylene oxide units, in the molecule.

[0202] Of suitability are, for example, sodium lauryl sulfate, ammonium lauryl sulfate, sodium lauryl ether sulfate, ammonium lauryl ether sulfate, sodium lauroyl sarcosinate, sodium oleyl succinate, ammonium lauryl sulfosuccinate, sodium dodecylbenzenesulfonate, triethanolamine dodecylbenzenesulfonate.

[0203] Suitable amphoteric surfactants are, for example, alkylbetaines, alkylamidopropylbetaines, alkylsulfobetaines, alkyl glycinates, alkyl carboxyglycinates, alkyl amphoacetates or -propionates, alkyl amphodiacetates or -dipropionates.

[0204] For example, cocodimethylsulfopropylbetaine, laurylbetaine, cocamidopropylbetaine or sodium cocamphopropionate can be used.

[0205] Suitable nonionic surfactants are, for example, the reaction products of aliphatic alcohols or alkylphenols having 6 to 20 carbon atoms in the alkyl chain, which may be linear or branched, with ethylene oxide and/or propylene oxide. The amount of alkylene oxide is about 6 to 60 moles per mole of alcohol. Also suitable are alkylamine oxides, mono- or dialkylalkanolamides, fatty acid esters of polyethylene glycols, alkyl polyglycosides or sorbitan ether esters.

[0206] Furthermore, the shampoo formulations can comprise customary cationic surfactants, such as, for example, quaternary ammonium compounds, for example cetyltrimethylammonium chloride.

[0207] To achieve certain effects, customary conditioners can be used in combination with the peptides according to the invention in the shampoo formulations.

[0208] These include, for example, the abovementioned cationic polymers with the INCl name Polyquaternium, in particular copolymers of vinylpyrrolidone/N-vinylimidazolium salts (Luviquat FC, Luviquat HM, Luviquat MS, Luviquat Care), copolymers of N-vinylpyrrolidone/dimethylaminoethyl methacrylate, quaternized with diethyl sulfate (Luviquat D PQ 11), copolymers of N-vinylcaprolactam/N-vinylpyrrolidone/N-vinylimidazolium salts (Luviquat D Hold), cationic cellulose derivatives (Polyquaternium-4 and -10), acrylamide copolymers (Polyquaternium-7). In addition, protein hydrolyzates can be used, and also conditioning substances based on silicone compounds, for example polyalkylsiloxanes, polyarylsiloxanes, polyarylalkylsiloxanes, polyether siloxanes or silicone resins. Further suitable silicone compounds are dimethicone copolyols (CTFA) and aminofunctional silicone compounds such as amodimethicones (CTFA). In addition, cationic guar derivatives, such as guar hydroxypropyltrimonium chloride (INCl) can be used.

[0209] The invention will now be illustrated further by reference to the following nonlimiting examples.

### EXPERIMENTAL SECTION

### 1. Test Examples A

### Example 1

### Inhibition of Malassezia furfur by P18

[0210] Growth medium: M472-Pitysporum medium according to DSMZ

40 g/1 malt extract
20 g/l ox bile

### 10 g/l Tween 40

[0211] The components were sterilized at 121° C., 1 bar superatmospheric pressure for 20 minutes.

[0212] 2 g/l of olive oil were sterilized by filtration and, after autoclaving, added to the other components.

[0213] Since it was a two-phase medium, the complete medium was treated with sonication in order to enlarge the phase boundary.

[0214] For agar plates, if appropriate, 150 g/l of agar agar were added to the medium.

[0215] The growth test was carried out as follows: A shake flask with M472-Pitysporum medium was inoculated with M. furfur and incubated with shaking overnight at 30° C. and 200 rpm.

[0216] A 96-well microtiter plate was filled with in each case 100 μl of M472-Pitysporum medium and inoculated with M. furfur suspension of the overnight culture. The M. furfur suspension was adjusted at the start of the experiment to an optical density, measured at 620 nm, of 0.02. The concentrates of the inhibitor solutions were 1 mM in water or DMSO.

[0217] The growth of the following batches was compared by measuring the optical density:

[0218] M. furfur suspension without the addition of an inhibitor.

[0219] M. furfur suspension without the addition of an inhibitor, but the addition of 2.5 μl of DMSO, which is comparable with the remaining experiments. This was to exclude that an inhibition is attributable merely to the effect of the DMSO, or a false positive result being observed.

[0220] M. furfur suspension and addition of an aqueous P18 solution with a final concentration of 25 μM.

[0221] M. furfur suspension and addition of a P18 solution in DMSO with a final concentration of 25 μM.

[0222] M. furfur suspension and addition of a zinc pyrithione (ZPT, Sigma-Aldrich) solution in DMSO with a final concentration of 25 μM.

[0223] M. furfur suspension and addition of a Ketoconazole (Sigma-Aldrich) solution in DMSO with a final concentration of 25 μM.

[0224] The microtiter plate was incubated with shaking at 30° C.

[0225] The growth was observed over 40 hours by measuring the optical density. The colony-forming units (CFU) were then determined by plating out 10 μl from each of the suspensions and, after incubation for 6 days, counting the colonies. The CFU was determined in order to exclude an influence of the two-phase medium and also the growth form of M. furfur on the optical density. However, in all of the experiments, the CFU correlated with the measured growth curves. The CFU measurement was helpful in order to detect weak growth compared to no measurable growth. The experiments were carried out at least in triple determinations and independently repeated. The results of one example experiment are summarized in Tables 1 and 2.

TABLE 1
Measurement of the optical density

| | | | Addition of | Addition of | Addition of | Addition of |
|---|---|---|---|---|---|---|
| | | without | aqueous P18 | P18 solution | ZPT solution | Ketoconazole |
| Incubation | without | inhib. | solution | in DMSO | in DMSO | solution in |
| time [h] | inhib. | with DMSO | [25 μM] | [25 μM] | [25 μM] | DMSO [25 μM] |
| 0 | 0 | 0 | 0 | 0 | 0 | 0 |
| 16 | 0 | 0 | 0 | 0 | 0 | 0 |
| 24 | 0.21 | 0.12 | 0 | 0 | 0 | 0.004 |
| 40 | 0.42 | 0.25 | 0 | 0 | 0 | 0.013 |

TABLE 2
Counting the colony-forming units

| | | | Addition of | Addition of | Addition of | Addition of |
|---|---|---|---|---|---|---|
| | | without | aqueous P18 | P18 solution | ZPT solution | Ketoconazole |
| Incubation | without | inhib. | solution | in DMSO | in DMSO | solution in |
| time [h] | inhib. | with DMSO | [25 μM] | [25 μM] | [25 μM] | DMSO [25 μM] |
| 16 | >10 000 | >10 000 | 62 | 8 | 42 | 80 |
| 24 | >10 000 | >10 000 | 41 | 0 | 22 | 22 |
| 40 | >10 000 | >10 000 | 120 | 0 | 28 | 90 |

[0226] The measurements for the optical density and the CFU show that the growth of M. furfur is effectively inhibited over the observed time period. Up to 40 hours, this inhibition was more effective compared to active ingredients such as zinc pyrithione (ZPT) or Ketoconazole.

### Example 2

### Inhibition of Malassezia Furfur by P18 Compared to Magainin 2 and Cecropin A

[0227] The fusion peptide P18 is derived from magainin 2 and cecropin A. It was therefore investigated whether P18 more effectively inhibits the growth of Malassezia furfur than magainin 2 or cecropin A alone. For this, the procedure was as described in Example 1. 1 mM stock solutions of the fusion peptide P18, magainin 2 and cecropin A in DMSO were prepared. The final concentrations of the peptides in the growth experiments were 25 μM. The same amount of DMSO was likewise added to the suspension without inhibitor in order to exclude a growth-inhibiting effect of the DMSO.

[0228] The growth of the following mixtures was compared by measuring the optical density:

[0229] M. furfur suspension without the addition of an inhibitor, but with the addition of 2.5 μl of DMSO, which is comparable with the remaining experiments. This was to exclude that an inhibition is attributable merely to the effect of the DMSO.

[0230] M. furfur suspension and addition of a magainin 2 solution in DMSO with a final concentration of 25 μM.

[0231] M. furfur suspension and addition of a cecropin A solution in DMSO with a final concentration of 25 μM.

[0232] M. furfur suspension and addition of a peptide P18 (SEQ ID NO₃) solution in DMSO with a final concentration of 25 μM.

[0233] The experimental results of an example experiment are summarized in Table 3 below.

TABLE 3
CFU comparison of P18, magainin 2 and cecropin A

| | | Addition of | Addition of | Addition of |
|---|---|---|---|---|
| | | magainin 2 | Cecropin A | P18 |
| | without | solution in | solution in | solution in |
| Incubation | inhib. with | DMSO | DMSO | DMSO |
| time [h] | DMSO | [25 μM] | [25 μM] | [25 μM] |
| 64 | >10 000 | >10 000 | >5000 | 0 |
| 72 | >10 000 | >10 000 | >5000 | 23 |

[0234] It was found that the peptide P18 inhibits the growth of M. furfur more effectively than magainin 2 or cecropin A alone.

### Example 3

### Long-Term Stability of P18

[0235] The long-term stability of P18 was observed over a period of 2 weeks. For this, a 1 mM P18 solution in water was incubated at 37° C. over the entire period. At the start of the experiment and then on these two weeks, the antimicrobial activity was detected through inhibition of the growth of Escherichia coli. The growth medium used here was LB medium as complex medium. The medium comprised 10 g of trypton, 5 g of yeast extract and 10 g of NaCl per liter.

[0236] The growth test was carried out as follows: A shake flask of LB medium was inoculated with Escherichia coli and incubated overnight with shaking at 37° C. and 200 rpm. A 96-well microtiter plate was filled with in each case 100 μl of LB medium and inoculated with E. coli suspension of the overnight culture. The E. coli suspension was adjusted at the start of the experiment to an optical density, measured at 620 nm, of about 0.02. The concentrates of the P18 inhibitor solutions were 1 mM in water.

[0237] The growth of the following mixtures was compared by measuring the optical density:

[0238] E. coli suspension without the addition of an inhibitor.

[0239] E. coli suspension and addition of an aqueous P18 solution with a final concentration of 25 μM. The aqueous P18 solution had been freshly prepared.

[0240] E. coli suspension and addition of an aqueous P18 solution with a final concentration of 25 μM. The aqueous stock solution had been incubated for 2 weeks at 37° C.

[0241] The growth was observed over a period of 40 hours by measuring the optical density. It was found that the antimicrobial activity was unchanged even after incubation for 2 weeks at 37° C. and effectively inhibited the growth of E. coli over a period of 40 hours. The results are summarized in Table 4.

TABLE 4
Long-term stability, measured via the optical density at 620 nm

| | | | Addition | Addition |
|---|---|---|---|---|
| | | | of fresh | of stored |
| | | E. coli | aqueous | aqueous |
| | Sterile | suspension | P18 | P18 |
| | LB | without | solution | solution |
| Incubation time [h] | medium | inhib. | [25 μM] | [25 μM] |
| 0 | 0 | 0.017 | 0.098 | 0.081 |
| 16 | 0 | 0.656 | 0 | 0 |
| 24 | 0 | 0.546 | 0 | 0 |
| 40 | 0 | 0.508 | 0 | 0 |

### Example 4

### Biodegradability of P18

[0242] Firstly, the peptide P18 was digested by adding chymotrypsin (from bovine pancreas, Sigma). For this, a 1 mM P18 solution was prepared and treated in accordance with the manufacturer's instructions. The samples were incubated for 16 hours at 37° C. The negative control used was a sample of a P18 solution without addition of chymotrypsin or a control solution which comprised only chymotrypsin, but no P18. The antimicrobial activity of P18 on E. coli cells was then investigated. The test was carried out as described in Example 3.

[0243] The growth of the following mixtures was compared by measuring the optical density:

[0244] E. coli suspension without the addition of an inhibitor.

[0245] E. coli suspension and addition of an aqueous P18 solution with a final concentration of 10 μM. The P18 solution had been stored beforehand for 16 hours at 37° C.

[0246] E. coli suspension and addition of an aqueous P18 solution with a final concentration of 10 μM. The P18 solution had been stored beforehand in accordance with the manufacturer's instructions for 16 hours at 37° C. and treated with chymotrypsin.

[0247] E. coli suspension and addition of an aqueous chymotrypsin solution which comprised, as control, the same amount of chymotrypsin as the P18 solution which was digested with chymotrypsin. This solution too had been stored beforehand for 16 hours at 37° C. This mixture was chosen in order to exclude an antimicrobial effect of the chymotrypsin.

[0248] The growth was observed over a period of 16 hours by measuring the optical density. It was found that the optical density of all samples developed similarly, i.e. microbial growth took place. Only the mixture to which undigested P18 solution had been added exhibited no or strongly inhibited microbial growth. These results show that a digestion of P18 with a serine protease, such as, for example, chymotrypsin, is possible, and demonstrate the biodegradability of the peptide. The results are summarized in Table 5.

TABLE 5
Biodegradability measured via the optical density at
620 nm in two independent experiments

| | | | Addition of | |
|---|---|---|---|---|
| | | | aqueous P18 | |
| | E. coli | Addition of | solution | Addition of |
| | suspension | aqueous P18 | [10 μM] | chymotrypsin |
| Incubation | without | solution | digested with | control |
| time [h] | inhib. | [10 μM] | chymotrypsin | solution |
| 0 | 0.01-0.008 | 0-0 | 0.01-0 | 0.02-0.01 |
| 16 | 0.6-0.49 | 0.01-0.09 | 0.64-0.63 | 0.58-0.54 |

### Example 5

### Inhibition of Gram-Positive and Gram-Negative Bacteria

[0249] The growth inhibition by P18 was investigated on Gram-positive and Gram-negative bacteria. Shin et al. 1999 (loc.cit.) had already detected an inhibition on the model organisms Escherichia coli and Bacillus subtilis within a period up to 18 hours. However, growth experiments in this paper showed that an inhibition by P18 acts differently on Gram-positive and Gram-negative bacteria.

[0250] The growth medium used for this was LB medium as complex medium for the organisms Escherichia coli, Bacillus subtilis and Brevibacterium epidermidis. The medium comprised 10 g of trypton, 5 g of yeast extract and 10 g of NaCl per liter.

[0251] The growth test was carried out as follows: A shake flask with medium was inoculated with Escherichia coli, Bacillus subtilis or Brevibacterium epidermidis and incubated with shaking overnight at 30° C. and 200 rpm. A 96-well microtiter plate was filled with in each case 100 μl LB medium and inoculated with E.-coli, B.-subtilis or B. epidermidis suspensions of the overnight culture. The bacteria suspension was adjusted at the start of the experiment to an optical density, measured at 620 nm, of about 0.02. The concentrates of the P18 inhibitor solutions were 1 mM in water.

[0252] The growth of the following mixtures was compared by measuring the optical density:

[0253] bacteria suspension without the addition of an inhibitor;

[0254] bacteria suspension and addition of an aqueous P18 solution with a final concentration of 25 μM. The aqueous P18 solution had been freshly prepared.

[0255] The growth was observed over a period of 40 hours by measuring the optical density. It was found that P18 effectively inhibited the growth of the Gram-negative E. coli over this period. The growth of Gram-positive bacteria was inhibited initially. Within the experimental period of 40 hours, however, the model organisms B. subtilis and B. epidermidis inhibited with P18 achieved growth densities comparable with the noninhibited culture. These results suggest a different effect of P18 on Gram-positive and Gram-negative organisms. This property is advantageous since the human skin flora is preferably populated by Gram-positive bacteria and consequently an application of P18 does not disrupt this in the long term. The results are summarized in Table 6 below.

TABLE 6
Comparison of the growth of Gram-negative and Gram-positive model organisms,
measured by the optical density at 620 nm (n.d. not measured).

| | E. coli | E. coli | B. subtilis | B. subtilis | B. epidermidis | B. epidermidis |
|---|---|---|---|---|---|---|
| | suspension | suspension with | suspension | suspension with | suspension | suspension with |
| Incubation | without | inhib. [25 μM | without | inhib. [25 μM | without | inhib. [25 μM |
| time [h] | inhib. | P18 solution] | inhib. | P18 solution] | inhib. | P18 solution] |
| 16 | 0.5 | 0.09 | 0.77 | 0.25 | 0.85 | 0.29 |
| 24 | 0.68 | 0.06 | 0.71 | 0.96 | 1.11 | 0.56 |
| 40 | 0.84 | 0.07 | 0.76 | 0.67 | 1.39 | 1.24 |

The values given are mean values from 8 mixtures.

### 2. Formulation Examples A

[0256] Dermocosmetic preparations comprising the peptide P18 are described below. The peptide P18 is specified in the examples below by way of representation of all of the other peptides described above. It will be appreciated by the person skilled in the art that all of the other specified peptides according to the invention can also be used in the preparations given below.

AI=Active ingredient

### Example 6

### Use of P18 in an emulsion for day care—O/W type

### AI 1%:

| | % | Ingredient (INCI) |
|---|---|---|
| A | 1.7 | Ceteareth-6, stearyl alcohol |
| | 0.7 | Ceteareth-25 |
| | 2.0 | Diethylaminohydroxybenzoylhexyl benzoate |
| | 2.0 | PEG-14 dimethicon |
| | 3.6 | Cetearyl alcohol |
| | 6.0 | Ethylhexyl methoxycinnamate |
| | 2.0 | Dibutyl adipate |
| B | 5.0 | Glycerol |
| | 0.2 | Disodium EDTA |
| | 1.0 | Panthenol |
| | q.s. | Preservative |
| | 67.8 | Aqua dem. |
| C | 4.0 | Caprylic/capric triglyceride, sodium acrylate copolymer |
| D | 0.2 | Sodium ascorbyl phosphate |
| | 1.0 | Tocopheryl acetate |
| | 0.2 | Bisabolol |
| | 1.0 | Caprylic/capric triglyceride, sodium ascorbate, tocopherol, |
| | | retinol |
| | 1.0 | Aqueous solution with about 7% P18 |
| E | q.s. | Sodium hydroxide |

### AI 5%:

| | % | Ingredient (INCI) |
|---|---|---|
| A | 1.7 | Ceteareth-6, stearyl alcohol |
| | 0.7 | Ceteareth-25 |
| | 2.0 | Diethylaminohydroxybenzoylhexyl benzoate |
| | 2.0 | PEG-14 dimethicone |
| | 3.6 | Cetearyl alcohol |
| | 6.0 | Ethylhexyl methoxycinnamate |
| | 2.0 | Dibutyl adipate |
| B | 5.0 | Glycerol |
| | 0.2 | Disodium EDTA |
| | 1.0 | Panthenol |
| | q.s. | Preservative |
| | 63.8 | Aqua dem. |
| C | 4.0 | Caprylic/capric triglyceride, sodium acrylate copolymer |
| D | 0.2 | Sodium ascorbyl phosphate |
| | 1.0 | Tocopheryl acetate |
| | 0.2 | Bisabolol |
| | 1.0 | Caprylic/capric triglyceride, sodium ascorbate, tocopherol, |
| | | retinol |
| | 5.0 | Aqueous solution with about 7% P18 |
| E | q.s. | Sodium hydroxide |

[0259] Preparation: Heat phases A and B separately from one another to about 80° C. Stir phase B into phase A and homogenize. Stir phase C into the combined phases A and B and homogenize again. Cool, with stirring, to about 40° C., add phase D, adjust the pH to about 6.5 with phase E, homogenize and cool to room temperature with stirring.

[0260] The formulation is prepared without protective gas. Bottling must be into oxygen-impermeable packagings, e.g. aluminum tubes.

### Example 7

### Use of P18 in a protective day cream—O/W type

### AI 1%:

| | % | Ingredient (INCI) |
|---|---|---|
| A | 1.7 | Ceteareth-6, stearyl alcohol |
| | 0.7 | Ceteareth-25 |
| | 2.0 | Diethylaminohydroxybenzoylhexyl benzoate |
| | 2.0 | PEG-14 dimethicone |
| | 3.6 | Cetearyl alcohol |
| | 6.0 | Ethylhexyl methoxycinnamate |
| | 2.0 | Dibutyl adipate |
| B | 5.0 | Glycerol |
| | 0.2 | Disodium EDTA |
| | 1.0 | Panthenol |
| | q.s. | Preservative |
| | 68.6 | Aqua dem. |
| C | 4.0 | Caprylic/capric triglyceride, sodium acrylate copolymer |
| D | 1.0 | Sodium ascorbyl phosphate |
| | 1.0 | Tocopheryl acetate |
| | 0.2 | Bisabolol |
| | 1.0 | Aqueous solution with about 7% P18 |
| E | q.s. | Sodium hydroxide |

### AI 5%:

| | % | Ingredient (INCI) |
|---|---|---|
| A | 1.7 | Ceteareth-6, stearyl alcohol |
| | 0.7 | Ceteareth-25 |
| | 2.0 | Diethylaminohydroxybenzoylhexyl benzoate |
| | 2.0 | PEG-14 dimethicone |
| | 3.6 | Cetearyl alcohol |
| | 6.0 | Ethylhexyl methoxycinnamate |
| | 2.0 | Dibutyl adipate |
| B | 5.0 | Glycerol |
| | 0.2 | Disodium EDTA |
| | 1.0 | Panthenol |
| | q.s. | Preservative |
| | 64.6 | Aqua dem. |
| C | 4.0 | Caprylic/capric triglyceride, sodium acrylate copolymer |
| D | 1.0 | Sodium ascorbyl phosphate |
| | 1.0 | Tocopheryl acetate |
| | 0.2 | Bisabolol |
| | 5.0 | Aqueous solution with about 7% P18 |
| E | q.s. | Sodium hydroxide |

[0263] Preparation: Heat phases A and B separately from one another to about 80° C. Stir phase B into phase A and homogenize. Incorporate phase C into the combined phases A and B and homogenize. Cool, with stirring, to about 40° C. Add phase D, adjust the pH to about 6.5 with phase E and homogenize. Cool to room temperature with stirring.

### Example 8

### Use of P18 in a Face Cleansing Lotion—O/W type

### AI 1%:

| | % | Ingredient (INCI) |
|---|---|---|
| A | 10.0 | Cetearyl ethylhexanoate |
| | 10.0 | Caprylic/capric triglyceride |
| | 1.5 | Cyclopentasiloxane, cyclohexasiloxane |
| | 2.0 | PEG-40-hydrogenated castor oil |
| B | 3.5 | Caprylic/capric triglyceride, sodium acrylate copolymer |
| C | 1.0 | Tocopheryl acetate |
| | 0.2 | Bisabolol |
| | q.s. | Preservative |
| | q.s. | Perfume oil |
| D | 3.0 | Polyquaternium-44 |
| | 0.5 | Cocotrimonium methosulfate |
| | 0.5 | Ceteareth-25 |
| | 2.0 | Panthenol, propylene glycol |
| | 4.0 | Propylene glycol |
| | 0.1 | Disodium EDTA |
| | 1.0 | Aqueous solution with about 7% P18 |
| | 60.7 | Aqua dem. |

### AI 5%:

| | % | Ingredient (INCI) |
|---|---|---|
| A | 10.0 | Cetearyl ethylhexanoate |
| | 10.0 | Caprylic/capric triglyceride |
| | 1.5 | Cyclopentasiloxane, cyclohexasiloxane |
| | 2.0 | PEG-40-hydrogenated castor oil |
| B | 3.5 | Caprylic/capric triglyceride, sodium acrylate copolymer |
| C | 1.0 | Tocopheryl acetate |
| | 0.2 | Bisabolol |
| | q.s. | Preservative |
| | q.s. | Perfume oil |
| D | 3.0 | Polyquaternium-44 |
| | 0.5 | Cocotrimonium methosulfate |
| | 0.5 | Ceteareth-25 |
| | 2.0 | Panthenol, propylene glycol |
| | 4.0 | Propylene glycol |
| | 0.1 | Disodium EDTA |
| | 5.0 | Aqueous solution with about 7% P18 |
| | 56.7 | Aqua dem. |

[0266] Preparation: Dissolve phase A. Stir phase B into phase A, incorporate phase C into the combined phases A and B. Dissolve phase D, stir into the combined phases A, B and C and homogenize. Afterstir for 15 min.

### Example 9

### Use of P18 in a Daily Care Body Spray

### AI 1%:

| | % | Ingredient (INCI) |
|---|---|---|
| A | 3.0 | Ethylhexyl methoxycinnamate |
| | 2.0 | Diethylaminohydroxybenzoylhexyl benzoate |
| | 1.0 | Polyquaternium-44 |
| | 3.0 | Propylene glycol |
| | 2.0 | Panthenol, propylene glycol |
| | 1.0 | Cyclopentasiloxane, cyclohexasiloxane |
| | 10.0 | Octyldodecanol |
| | 0.5 | PVP |
| | 10.0 | Caprylic/capric triglyceride |
| | 3.0 | C₁₂₋₁₅-Alkyl benzoate |
| | 3.0 | Glycerol |
| | 1.0 | Tocopheryl acetate |
| | 0.3 | Bisabolol |
| | 1.0 | Aqueous solution with about 7% P18 |
| | 59.2 | Alcohol |

### AI 5%:

| | % | Ingredient (INCI) |
|---|---|---|
| A | 3.0 | Ethylhexyl methoxycinnamate |
| | 2.0 | Diethylaminohydroxybenzoylhexyl benzoate |
| | 1.0 | Polyquaternium-44 |
| | 3.0 | Propylene glycol |
| | 2.0 | Panthenol, propylene glycol |
| | 1.0 | Cyclopentasiloxane, cyclohexasiloxane |
| | 10.0 | Octyldodecanol |
| | 0.5 | PVP |
| | 10.0 | Caprylic/capric triglyceride |
| | 3.0 | C₁₂₋₁₅-Alkyl benzoate |
| | 3.0 | Glycerol |
| | 1.0 | Tocopheryl acetate |
| | 0.3 | Bisabolol |
| | 5.0 | Aqueous solution with about 7% P18 |
| | 55.2 | Alcohol |

[0269] Preparation: Weigh in the components of phase A and dissolve to give a clear solution.

### Example 10

### Use of P18 in a Skincare Gel

### AI 1%:

| | % | Ingredient (INCI) |
|---|---|---|
| A | 3.6 | PEG-40-hydrogenated castor oil |
| | 15.0 | Alcohol |
| | 0.1 | Bisabolol |
| | 0.5 | Tocopheryl acetate |
| | q.s. | Perfume oil |
| B | 3.0 | Panthenol |
| | 0.6 | Carbomer |
| | 1.0 | Aqueous solution with about 7% P18 |
| | 75.4 | Aqua dem. |
| C | 0.8 | Triethanolamine |

### AI 5%:

| | % | Ingredient (INCI) |
|---|---|---|
| A | 3.6 | PEG-40-hydrogenated castor oil |
| | 15.0 | Alcohol |
| | 0.1 | Bisabolol |
| | 0.5 | Tocopheryl acetate |
| | q.s. | Perfume oil |
| B | 3.0 | Panthenol |
| | 0.6 | Carbomer |
| | 5.0 | Aqueous solution with about 7% P18 |
| | 71.4 | Aqua dem. |
| C | 0.8 | Triethanolamine |

[0272] Preparation: Dissolve phase A to give a clear solution. Allow phase B to swell and neutralize with phase C. Stir phase A into the homogenized phase B and homogenize.

### Example 11

### Use of P18 in an Aftershave Lotion

### AI 1%:

| | % | Ingredient (INCI) |
|---|---|---|
| A | 10.0 | Cetearyl ethylhexanoate |
| | 5.0 | Tocopheryl acetate |
| | 1.0 | Bisabolol |
| | 0.1 | Perfume oil |
| | 0.3 | Acrylates/C₁₀₋₃₀ alkyl acrylate crosspolymer |
| B | 15.0 | Alcohol |
| | 1.0 | Panthenol |
| | 3.0 | Glycerol |
| | 1.0 | Aqueous solution with about 7% P18 |
| | 0.1 | Triethanolamine |
| | 63.5 | Aqua dem. |

### AI 5%:

| | % | Ingredient (INCI) |
|---|---|---|
| A | 10.0 | Cetearyl ethylhexanoate |
| | 5.0 | Tocopheryl acetate |
| | 1.0 | Bisabolol |
| | 0.1 | Perfume oil |
| | 0.3 | Acrylates/C₁₀₋₃₀ alkyl acrylate crosspolymer |
| B | 15.0 | Alcohol |
| | 1.0 | Panthenol |
| | 3.0 | Glycerol |
| | 5.0 | Aqueous solution with about 7% P18 |
| | 0.1 | Triethanolamine |
| | 59.5 | Aqua dem. |

[0275] Preparation: Mix the components of phase A. Dissolve phase B, incorporate into phase A and homogenize.

### Example 12

### Use of P18 in an Aftersun Lotion

### AI 1%:

| | % | Ingredient (INCI) |
|---|---|---|
| A | 0.4 | Acrylates/C₁₀₋₃₀-alkyl acrylate crosspolymer |
| | 15.0 | Cetearyl ethylhexanoate |
| | 0.2 | Bisabolol |
| | 1.0 | Tocopheryl acetate |
| | q.s. | Perfume oil |
| B | 1.0 | Panthenol |
| | 15.0 | Alcohol |
| | 3.0 | Glycerol |
| | 1.0 | Aqueous solution with about 7% P18 |
| | 63.2 | Aqua dem. |
| C | 0.2 | Triethanolamine |

### AI 5%:

| | % | Ingredient (INCI) |
|---|---|---|
| A | 0.4 | Acrylates/C₁₀₋₃₀ alkyl acrylate crosspolymer |
| | 15.0 | Cetearyl ethylhexanoate |
| | 0.2 | Bisabolol |
| | 1.0 | Tocopheryl acetate |
| | q.s. | Perfume oil |
| B | 1.0 | Panthenol |
| | 15.0 | Alcohol |
| | 3.0 | Glycerol |
| | 5.0 | Aqueous solution with about 7% P18 |
| | 59.2 | Aqua dem. |
| C | 0.2 | Triethanolamine |

[0278] Preparation: Mix the components of phase A. Stir phase B into phase A with homogenization. Neutralize with phase C and homogenize again.

### Example 13

### Use of P18 in a Sunscreen Lotion

### AI 1%:

| | % | Ingredient (INCI) |
|---|---|---|
| A | 4.5 | Ethylhexyl methoxycinnamate |
| | 2.0 | Diethylaminohydroxybenzoylhexyl benzoate |
| | 3.0 | Octocrylene |
| | 2.5 | Di-C₁₂₋₁₃-alkyl malate |
| | 0.5 | Tocopheryl acetate |
| | 4.0 | Polyglyceryl-3 methylglucose distearate |
| B | 3.5 | Cetearyl isononanoate |
| | 1.0 | VP/eicosene copolymer |
| | 5.0 | Isohexadecane |
| | 2.5 | Di-C₁₂₋₁₃-alkyl malate |
| | 3.0 | Titanium dioxide, trimethoxycaprylylsilane |
| C | 5.0 | Glycerol |
| | 1.0 | Sodium cetearyl sulfate |
| | 0.5 | Xanthan gum |
| | 59.7 | Aqua dem. |
| D | 1.0 | Aqueous solution with about 7% P18 |
| | 1.0 | Phenoxyethanol, methyl paraben, ethyl paraben, |
| | | butyl paraben, propyl paraben, isobutyl paraben |
| | 0.3 | Bisabolol |

### AI 5%:

| | % | Ingredient (INCI) |
|---|---|---|
| A | 4.5 | Ethylhexyl methoxycinnamate |
| | 2.0 | Diethylaminohydroxybenzoylhexyl benzoate |
| | 3.0 | Octocrylene |
| | 2.5 | Di-C₁₂₋₁₃-alkyl malate |
| | 0.5 | Tocopheryl acetate |
| | 4.0 | Polyglyceryl-3 methylglucose distearate |
| B | 3.5 | Cetearyl isononanoate |
| | 1.0 | VP/eicosene copolymer |
| | 5.0 | Isohexadecane |
| | 2.5 | Di-C₁₂₋₁₃-alkyl malate |
| | 3.0 | Titanium dioxide, trimethoxycaprylylsilane |
| C | 5.0 | Glycerol |
| | 1.0 | Sodium cetearyl sulfate |
| | 0.5 | Xanthan gum |
| | 55.7 | Aqua dem. |
| D | 5.0 | Aqueous solution with about 7% P18 |
| | 1.0 | Phenoxyethanol, methyl paraben, ethyl paraben, |
| | | butyl paraben, propyl paraben, isobutyl paraben |
| | 0.3 | Bisabolol |

[0281] Preparation: Heat the components of phases A and B separately from one another to about 80° C. Stir phase B into phase A and homogenize. Heat phase C to about 80° C. and stir into the combined phases A and B with homogenization. Cool to about 40° C. with stirring, add phase D and homogenize again.

### Example 14

### Use of P18 in a Sunscreen Lotion—O/W Type

### AI 1%

| | % | Ingredient (INCI) |
|---|---|---|
| A | 2.0 | Ceteareth-6, stearyl alcohol |
| | 2.0 | Ceteareth-25 |
| | 3.0 | Tribehenin |
| | 2.0 | Cetearyl alcohol |
| | 2.0 | Cetearyl ethylhexanoate |
| | 5.0 | Ethylhexyl methoxycinnamate |
| | 1.0 | Ethylhexyltriazone |
| | 1.0 | VP/eicosene copolymer |
| | 7.0 | Isopropyl myristate |
| B | 5.0 | Zinc oxide, triethoxycaprylylsilane |
| C | 0.2 | Xanthan gum |
| | 0.5 | Hydroxyethyl acrylate/sodium acryloyldimethyltaurate |
| | | copolymer, squalane, polysorbate 60 |
| | 0.2 | Disodium EDTA |
| | 5.0 | Propylene glycol |
| | 0.5 | Panthenol |
| | 60.9 | Aqua dem. |
| D | 1.0 | Aqueous solution with about 7% P18 |
| | 0.5 | Phenoxyethanol, methyl paraben, ethyl paraben, |
| | | butyl paraben, propyl paraben, isopropyl paraben |
| | 1.0 | Tocopheryl acetate |
| | 0.2 | Bisabolol |

### AI 5%

| | % | Ingredient (INCI) |
|---|---|---|
| A | 2.0 | Ceteareth-6, Stearyl alcohol |
| | 2.0 | Ceteareth-25 |
| | 3.0 | Tribehenin |
| | 2.0 | Cetearyl alcohol |
| | 2.0 | Cetearyl ethylhexanoate |
| | 5.0 | Ethylhexyl methoxycinnamate |
| | 1.0 | Ethylhexyltriazone |
| | 1.0 | VP/eicosene copolymer |
| | 7.0 | Isopropyl myristate |
| B | 5.0 | Zinc oxide, triethoxycaprylylsilane |
| C | 0.2 | Xanthan gum |
| | 0.5 | Hydroxyethyl acrylate/sodium acryloyldimethyltaurate |
| | | copolymer, squalane, polysorbate 60 |
| | 0.2 | Disodium EDTA |
| | 5.0 | Propylene glycol |
| | 0.5 | Panthenol |
| | 56.9 | Aqua dem. |
| D | 5.0 | Aqueous solution with about 7% P18 |
| | 0.5 | Phenoxyethanol, methyl paraben, ethyl paraben, |
| | | butyl paraben, propyl paraben, isopropyl paraben |
| | 1.0 | Tocopheryl acetate |
| | 0.2 | Bisabolol |

[0284] Preparation: Heat phase A to about 80° C., stir in phase B and homogenize for 3 min. Likewise heat phase C to 80° C. and stir into the combined phases A and B with homogenization. Cool to about 40° C., stir in phase D and homogenize again.

### Example 15

### Use of P18 in a Sunscreen Lotion—O/W Type

### AI 1%:

| | % | Ingredient (INCI) |
|---|---|---|
| A | 3.5 | Ceteareth-6, stearyl alcohol |
| | 1.5 | Ceteareth-25 |
| | 7.5 | Ethylhexyl methoxycinnamate |
| | 2.0 | Diethylaminohydroxybenzoylhexyl benzoate |
| | 2.0 | Cyclopentasiloxane, cyclohexasiloxane |
| | 0.5 | Beeswax |
| | 3.0 | Cetearyl alcohol |
| | 10.0 | Caprylic/capric triglyceride |
| B | 5.0 | Titanium dioxide, silicon dioxide, methicone, aluminum oxide |
| C | 3.0 | Glycerol |
| | 0.2 | Disodium EDTA |
| | 0.3 | Xanthan gum |
| | 1.0 | Decyl glucoside |
| | 2.0 | Panthenol, propylene glycol |
| | 56.3 | Aqua dem. |
| D | 1.0 | Aqueous solution with about 7% P18 |
| | 1.0 | Tocopheryl acetate |
| | 0.2 | Bisabolol |
| | q.s. | Perfume oil |
| | q.s. | Preservative |

### AI 5%:

| | % | Ingredient (INCI) |
|---|---|---|
| A | 3.5 | Ceteareth-6, Stearyl alcohol |
| | 1.5 | Ceteareth-25 |
| | 7.5 | Ethylhexyl methoxycinnamate |
| | 2.0 | Diethylaminohydroxybenzoylhexyl benzoate |
| | 2.0 | Cyclopentasiloxane, cyclohexasiloxane |
| | 0.5 | Beeswax |
| | 3.0 | Cetearyl alcohol |
| | 10.0 | Caprylic/capric triglyceride |
| B | 5.0 | Titanium dioxide, silicon dioxide, methicone, aluminum oxide |
| C | 3.0 | Glycerol |
| | 0.2 | Disodium EDTA |
| | 0.3 | Xanthan gum |
| | 1.0 | Decyl glucoside |
| | 2.0 | Panthenol, propylene glycol |
| | 52.3 | Aqua dem. |
| D | 5.0 | Aqueous solution with about 7% P18 |
| | 1.0 | Tocopheryl acetate |
| | 0.2 | Bisabolol |
| | q.s. | Perfume oil |
| | q.s. | Preservative |

[0287] Preparation: Heat phase A to about 80° C., stir in phase B and homogenize for 3 min. Likewise heat phase C to 80° C. and stir into the combined phases A and B with homogenization. Cool to about 40° C., stir in phase D and homogenize again.

### Example 16

### Use of P18 in a Foot Balm

### AI 1%:

| | % | Ingredient (INCI) |
|---|---|---|
| A | 2.0 | Ceteareth-6, Stearyl alcohol |
| | 2.0 | Ceteareth-25 |
| | 5.0 | Cetearyl ethylhexanoate |
| | 4.0 | Cetyl alcohol |
| | 4.0 | Glyceryl stearate |
| | 5.0 | Mineral oil |
| | 0.2 | Menthol |
| | 0.5 | Camphor |
| B | 69.3 | Aqua dem. |
| | q.s. | Preservative |
| C | 1.0 | Bisabolol |
| | 1.0 | Tocopheryl acetate |
| D | 1.0 | Aqueous solution with about 7% P18 |
| | 5.0 | Witch hazel extract |

### AI 5%:

| | % | Ingredient (INCI) |
|---|---|---|
| A | 2.0 | Ceteareth-6, Stearyl alcohol |
| | 2.0 | Ceteareth-25 |
| | 5.0 | Cetearyl ethylhexanoate |
| | 4.0 | Cetyl alcohol |
| | 4.0 | Glyceryl stearate |
| | 5.0 | Mineral oil |
| | 0.2 | Menthol |
| | 0.5 | Camphor |
| B | 65.3 | Aqua dem. |
| | q.s. | Preservative |
| C | 1.0 | Bisabolol |
| | 1.0 | Tocopheryl acetate |
| D | 5.0 | Aqueous solution with about 7% P18 |
| | 5.0 | Witch hazel extract |

[0290] Preparation: Heat the components of phases A and B separately from one another to about 80° C. Stir phase B into phase A with homogenization. With stirring, cool to about 40° C., add phases C and D and briefly afterhomogenize. With stirring, cool to room temperature.

### Example 17

### Use of P18 in a W/O Emulsion with Bisabolol

### AI 1%:

| | % | Ingredient (INCI) |
|---|---|---|
| A | 6.0 | PEG-7-hydrogenated castor oil |
| | 8.0 | Cetearyl ethylhexanoate |
| | 5.0 | Isopropyl myristate |
| | 15.0 | Mineral oil |
| | 0.3 | Magnesium stearate |
| | 0.3 | Aluminum stearate |
| | 2.0 | PEG-45/dodecyl glycol copolymer |
| B | 5.0 | Glycerol |
| | 0.7 | Magnesium sulfate |
| | 55.6 | Aqua dem. |
| C | 1.0 | Aqueous solution with about 7% P18 |
| | 0.5 | Tocopheryl acetate |
| | 0.6 | Bisabolol |

### AI 5%:

| | % | Ingredient (INCI) |
|---|---|---|
| A | 6.0 | PEG-7-hydrogenated castor oil |
| | 8.0 | Cetearyl ethylhexanoate |
| | 5.0 | Isopropyl myristate |
| | 15.0 | Mineral oil |
| | 0.3 | Magnesium stearate |
| | 0.3 | Aluminum stearate |
| | 2.0 | PEG-45/dodecyl glycol copolymer |
| B | 5.0 | Glycerol |
| | 0.7 | Magnesium sulfate |
| | 51.6 | Aqua dem. |
| C | 5.0 | Aqueous solution with about 7% P18 |
| | 0.5 | Tocopheryl acetate |

[0293] Preparation: Heat phases A and B separately from one another to about 85° C. Stir phase B into phase A and homogenize. With stirring, cool to about 40° C., add phase C and briefly homogenize again. With stirring, cool to room temperature.

### Example 18

### Foam Conditioner with Setting Agent

### AI 1%:

| | % | Ingredient (INCI) |
|---|---|---|
| A | 10.0 | PVP/VA copolymer |
| | 0.2 | Hydroxyethylcetyldimonium phosphate |
| | 0.2 | Ceteareth-25 |
| | 0.5 | Dimethicone copolyol |
| | q.s. | Perfume oil |
| | 10.0 | Alcohol |
| | 1.0 | Aqueous solution with about 7% P18 |
| | 68.1 | Aqua dem. |
| | 10.0 | Propane/butane |

### AI 5%:

| | % | Ingredient (INCI) |
|---|---|---|
| A | 10.0 | PVP/VA copolymer |
| | 0.2 | Hydroxyethylcetyldimonium phosphate |
| | 0.2 | Ceteareth-25 |
| | 0.5 | Dimethicone copolyol |
| | q.s. | Perfume oil |
| | 10.0 | Alcohol |
| | 5.0 | Aqueous solution with about 7% P18 |
| | 64.1 | Aqua dem. |
| | 10.0 | Propane/butane |

[0296] Preparation: Weigh the components of phase A together, stir until everything has dissolved, and bottle.

### Example 19

### Foam Conditioner

### AI 1%:

| | % | Ingredient (INCI) |
|---|---|---|
| A | 1.0 | Polyquaternium-4 |
| | 0.5 | Hydroxyethylcetyldimonium phosphate |
| | 1.0 | Aqueous solution with about 7% P18 |
| | q.s. | Perfume oil |
| | q.s. | Preservative |
| | 91.5 | Aqua dem. |
| | 6.0 | Propane/butane |

### AI 5%:

| | % | Ingredient (INCI) |
|---|---|---|
| A | 1.0 | Polyquaternium-4 |
| | 0.5 | Hydroxyethylcetyldimonium phosphate |
| | 5.0 | Aqueous solution with about 7% P18 |
| | q.s. | Perfume oil |
| | q.s. | Preservative |
| | 87.5 | Aqua dem. |
| | 6.0 | Propane/butane |

[0299] Preparation: Weigh the components of phase A together, stir until everything has dissolved to give a clear solution, and bottle.

### Example 20

### Foam Conditioner

### AI 1%:

| | % | Ingredient (INCI) |
|---|---|---|
| A | 1.0 | Polyquaternium-11 |
| | 0.5 | Hydroxyethylcetyldimonium phosphate |
| | 1.0 | Aqueous solution with about 7% P18 |
| | q.s. | Perfume oil |
| | q.s. | Preservative |
| | 91.5 | Aqua dem. |
| | 6.0 | Propane/butane |

### AI 5%:

| | % | Ingredient (INCI) |
|---|---|---|
| A | 1.0 | Polyquaternium-11 |
| | 0.5 | Hydroxyethylcetyldimonium phosphate |
| | 5.0 | Aqueous solution with about 7% P18 |
| | q.s. | Perfume oil |
| | q.s. | Preservative |
| | 87.5 | Aqua dem. |
| | 6.0 | Propane/butane |

[0302] Preparation: Weigh the components of phase A together, stir until everything has dissolved to give a clear solution, and bottle.

### Example 21

### Styling Foam

### AI 1%:

| | % | Ingredient (INCI) |
|---|---|---|
| A | 0.5 | Laureth-4 |
| | q.s. | Perfume oil |
| B | 77.3 | Aqua dem. |
| | 10.0 | Polyquaternium-28 |
| | 1.0 | Aqueous solution with about 7% P18 |
| | 0.5 | Dimethicone copolyol |
| | 0.2 | Ceteareth-25 |
| | 0.2 | Panthenol |
| | 0.1 | PEG-25 PABA |
| | 0.2 | Hydroxyethylcellulose |
| C | 10.0 | HFC 152 A |

### AI 5%:

| | % | Ingredient (INCI) |
|---|---|---|
| A | 0.5 | Laureth-4 |
| | q.s. | Perfume oil |
| B | 73.3 | Aqua dem. |
| | 10.0 | Polyquaternium-28 |
| | 5.0 | Aqueous solution with about 7% P18 |
| | 0.5 | Dimethicone copolyol |
| | 0.2 | Ceteareth-25 |
| | 0.2 | Panthenol |
| | 0.1 | PEG-25 PABA |
| | 0.2 | Hydroxyethylcellulose |
| C | 10.0 | HFC 152 A |

[0305] Preparation: Mix the components of phase A. Add the components of phase B one after the other and dissolve. Bottle with phase C.

### Example 22

### Styling Foam

### AI 1%:

| | % | Ingredient (INCI) |
|---|---|---|
| A | 2.0 | Cocotrimonium methosulfate |
| | q.s. | Perfume oil |
| B | 78.5 | Aqua dem. |
| | 6.7 | Acrylate copolymer |
| | 0.6 | AMP |
| | 1.0 | Aqueous solution with about 7% P18 |
| | 0.5 | Dimethicone copolyol |
| | 0.2 | Ceteareth-25 |
| | 0.2 | Panthenol |
| | 0.1 | PEG-25 PABA |
| | 0.2 | Hydroxyethylcellulose |
| C | 10.0 | HFC 152 A |

### AI 5%:

| | % | Ingredient (INCI) |
|---|---|---|
| A | 2.0 | Cocotrimonium methosulfate |
| | q.s. | Perfume oil |
| B | 74.5 | Aqua dem. |
| | 6.7 | Acrylate copolymer |
| | 0.6 | AMP |
| | 5.0 | Aqueous solution with about 7% P18 |
| | 0.5 | Dimethicone copolyol |
| | 0.2 | Ceteareth-25 |
| | 0.2 | Panthenol |
| | 0.1 | PEG-25 PABA |
| | 0.2 | Hydroxyethylcellulose |
| C | 10.0 | HFC 152 A |

[0308] Preparation: Mix the components of phase A. Add the components of phase B one after the other and dissolve. Bottle with phase C.

### Example 23

### Styling Foam

### AI 1%:

| | % | Ingredient (INCI) |
|---|---|---|
| A | 2.0 | Cocotrimonium methosulfate |
| | q.s. | Perfume oil |
| B | 7.70 | Polyquaternium-44 |
| | 1.0 | Aqueous solution with about 7% P18 |
| | q.s. | Preservative |
| | 79.3 | Aqua dem. |
| C | 10.0 | Propane/butane |

### AI 5%:

| | % | Ingredient (INCI) |
|---|---|---|
| A | 2.0 | Cocotrimonium methosulfate |
| | q.s. | Perfume oil |
| B | 7.70 | Polyquaternium-44 |
| | 5.0 | Aqueous solution with about 7% P18 |
| | q.s. | Preservative |
| | 75.3 | Aqua dem. |
| C | 10.0 | Propane/butane |

[0311] Preparation: Mix the components of phase A. Dissolve the components of phase B to give a clear solution, then stir phase B into phase A. Adjust the pH to 6-7, bottle with phase C.

### Example 24

### Styling Foam

### AI 1%:

| | % | Ingredient (INCI) |
|---|---|---|
| A | 2.00 | Cocotrimonium methosulfate |
| | q.s. | Perfume oil |
| B | 72.32 | Aqua dem. |
| | 2.00 | VP/acrylates/lauryl methacrylate copolymer |
| | 0.53 | AMP |
| | 1.00 | Aqueous solution with about 7% P18 |
| | 0.20 | Ceteareth-25 |
| | 0.50 | Panthenol |
| | 0.05 | Benzophenone-4 |
| | 0.20 | Amodimethicone, cetrimonium chloride, trideceth-12 |
| | 15.00 | Alcohol |
| C | 0.20 | Hydroxyethylcellulose |
| D | 6.00 | Propane/butane |

### AI 5%:

| | % | Ingredient (INCI) |
|---|---|---|
| A | 2.00 | Cocotrimonium methosulfate |
| | q.s. | Perfume oil |
| B | 68.32 | Aqua dem. |
| | 2.00 | VP/acrylates/lauryl methacrylate copolymer |
| | 0.53 | AMP |
| | 5.00 | Aqueous solution with about 7% P18 |
| | 0.20 | Ceteareth-25 |
| | 0.50 | Panthenol |
| | 0.05 | Benzophenone-4 |
| | 0.20 | Amodimethicone, cetrimonium chloride, trideceth-12 |
| | 15.00 | Alcohol |
| C | 0.20 | Hydroxyethylcellulose |
| D | 6.00 | Propane/butane |

[0314] Preparation: Mix the components of phase A. Add the components of phase B one after the other and dissolve. Dissolve phase C in the mixture of A and B, then adjust the pH to 6-7. Bottle with phase D.

### Example 25

### Styling Foam

### AI 1%:

| | % | Ingredient (INCI) |
|---|---|---|
| A | 2.00 | Cetrimonium chloride |
| | q.s. | Perfume oil |
| B | 67.85 | Aqua dem. |
| | 7.00 | Polyquaternium-46 |
| | 1.00 | Aqueous solution with about 7% P18 |
| | 0.20 | Ceteareth-25 |
| | 0.50 | Panthenol |
| | 0.05 | Benzophenone-4 |
| | 0.20 | Amodimethicone, cetrimonium chloride, trideceth-12 |
| | 15.00 | Alcohol |
| C | 0.20 | Hydroxyethylcellulose |
| D | 6.00 | Propane/butane |

### AI 5%:

| | % | Ingredient (INCI) |
|---|---|---|
| A | 2.00 | Cetrimonium chloride |
| | q.s. | Perfume oil |
| B | 63.85 | Aqua dem. |
| | 7.00 | Polyquaternium-46 |
| | 5.00 | Aqueous solution with about 7% P18 |
| | 0.20 | Ceteareth-25 |
| | 0.50 | Panthenol |
| | 0.05 | Benzophenone-4 |
| | 0.20 | Amodimethicone, cetrimonium chloride, trideceth-12 |
| | 15.00 | Alcohol |
| C | 0.20 | Hydroxyethylcellulose |
| D | 6.00 | Propane/butane |

[0317] Preparation: Mix the components of phase A. Add the components of phase B one after the other and dissolve. Dissolve phase C in the mixture of phase A and B, then adjust the pH to 6-7. Bottle with phase D.

### Example 26

### Styling Foam

### AI 1%:

| | % | Ingredient (INCI) |
|---|---|---|
| A | q.s. | PEG-40-hydrogenated castor oil |
| | q.s. | Perfume oil |
| | 85.5 | Aqua dem. |
| B | 7.0 | Sodium polystyrenesulfonate |
| | 1.0 | Aqueous solution with about 7% P18 |
| | 0.5 | Cetrimonium bromide |
| | q.s. | Preservative |
| C | 6.0 | Propane/butane |

### AI 5%:

| | % | Ingredient (INCI) |
|---|---|---|
| A | q.s. | PEG-40-hydrogenated castor oil |
| | q.s. | Perfume oil |
| | 81.5 | Aqua dem. |
| B | 7.0 | Sodium polystyrenesulfonate |
| | 5.0 | Aqueous solution with about 7% P18 |
| | 0.5 | Cetrimonium bromide |
| | q.s. | Preservative |
| C | 6.0 | Propane/butane |

[0320] Preparation: Solubilize phase A. Weigh phase B into phase A and dissolve to give a clear solution. Adjust the pH to 6-7, bottle with phase C.

### Example 27

### Styling Foam

### AI 1%:

| | % | Ingredient (INCI) |
|---|---|---|
| A | q.s. | PEG-40-hydrogenated castor oil |
| | q.s. | Perfume oil |
| | 92.0 | Aqua dem. |
| B | 0.5 | Polyquaternium-10 |
| | 1.0 | Aqueous solution with about 7% P18 |
| | 0.5 | Cetrimonium bromide |
| | q.s. | Preservative |
| C | 6.0 | Propane/butane |

### AI 5%:

| | % | Ingredient (INCI) |
|---|---|---|
| A | q.s. | PEG-40-hydrogenated castor oil |
| | q.s. | Perfume oil |
| | 88.0 | Aqua dem. |
| B | 0.5 | Polyquaternium-10 |
| | 5.0 | Aqueous solution with about 7% P18 |
| | 0.5 | Cetrimonium bromide |
| | q.s. | Preservative |
| C | 6.0 | Propane/butane |

[0323] Preparation: Solubilize phase A. Weigh phase B into phase A and dissolve to give a clear solution. Adjust the pH to 6-7, bottle with phase C.

### Example 28

### Styling Foam

### AI 1%:

| | % | Ingredient (INCI) |
|---|---|---|
| A | q.s. | PEG-40-hydrogenated castor oil |
| | q.s. | Perfume oil |
| | 82.5 | Aqua dem. |
| B | 10.0 | Polyquaternium-16 |
| | 1.0 | Aqueous solution with about 7% P18 |
| | 0.5 | Hydroxyethylcetyldimonium phosphate |
| | q.s. | Preservative |
| C | 6.0 | Propane/butane |

### AI 5%:

| | % | Ingredient (INCI) |
|---|---|---|
| A | q.s. | PEG-40-hydrogenated castor oil |
| | q.s. | Perfume oil |
| | 78.5 | Aqua dem. |
| B | 10.0 | Polyquaternium-16 |
| | 5.0 | Aqueous solution with about 7% P18 |
| | 0.5 | Hydroxyethylcetyldimonium phosphate |
| | q.s. | Preservative |
| C | 6.0 | Propane/butane |

[0326] Preparation: Solubilize phase A. Weigh phase B into phase A and dissolve to give a clear solution. Adjust the pH to 6-7, bottle with phase C.

### Example 29

### Styling Foam

### AI 1%:

| | % | Ingredient (INCI) |
|---|---|---|
| A | 2.0 | Cocotrimonium methosulfate |
| | q.s. | Perfume oil |
| B | 84.0 | Aqua dem. |
| | 2.0 | Chitosan |
| | 1.0 | Aqueous solution with about 7% P18 |
| | 0.5 | Dimethicone copolyol |
| | 0.2 | Ceteareth-25 |
| | 0.2 | Panthenol |
| | 0.1 | PEG-25 PABA |
| | 10.0 | HFC 152 A |

### AI 5%:

| | % | Ingredient (INCI) |
|---|---|---|
| A | 2.0 | Cocotrimonium methosulfate |
| | q.s. | Perfume oil |
| B | 80.0 | Aqua dem. |
| | 2.0 | Chitosan |
| | 5.0 | Aqueous solution with about 7% P18 |
| | 0.5 | Dimethicone copolyol |
| | 0.2 | Ceteareth-25 |
| | 0.2 | Panthenol |
| | 0.1 | PEG-25 PABA |
| | 10.0 | HFC 152 A |

[0329] Preparation: Mix the components of phase A. Add the components of phase B one after the other and dissolve. Bottle with phase C.

### Example 30

### Care Shampoo

### AI 1%

| | % | Ingredient (INCI) |
|---|---|---|
| A | 30.0 | Sodium laureth sulfate |
| | 6.0 | Sodium cocoamphoacetate |
| | 6.0 | Cocamidopropylbetaine |
| | 3.0 | Sodium laureth sulfate, glycol distearate, |
| | | cocamide-MEA, laureth-10 |
| | 1.0 | Aqueous solution with about 7% P18 |
| | 7.7 | Polyquaternium-44 |
| | 2.0 | Amodimethicone |
| | q.s. | Perfume oil |
| | q.s. | Preservative |
| | 1.0 | Sodium chloride |
| | 43.3 | Aqua dem. |
| B | q.s. | Citric acid |

### AI 5%

| | % | Ingredient (INCI) |
|---|---|---|
| A | 30.0 | Sodium laureth sulfate |
| | 6.0 | Sodium cocoamphoacetate |
| | 6.0 | Cocamidopropylbetaine |
| | 3.0 | Sodium laureth sulfate, glycol distearate, |
| | | cocamide-MEA, laureth-10 |
| | 5.0 | Aqueous solution with about 7% P18 |
| | 7.7 | Polyquaternium-44 |
| | 2.0 | Amodimethicone |
| | q.s. | Perfume oil |
| | q.s. | Preservative |
| | 1.0 | Sodium chloride |
| | 39.3 | Aqua dem. |
| B | q.s. | Citric acid |

[0332] Preparation: Mix the components of phase A and dissolve. Adjust the pH to 6-7 with citric acid.

### Example 31

### Shower Gel

### AI 1%

| | % | Ingredient (INCI) |
|---|---|---|
| A | 40.0 | Sodium laureth sulfate |
| | 5.0 | Decyl glucoside |
| | 5.0 | Cocamidopropylbetaine |
| | 1.0 | Aqueous solution with about 7% P18 |
| | 1.0 | Panthenol |
| | q.s. | Perfume oil |
| | q.s. | Preservative |
| | 2.0 | Sodium chloride |
| | 46.0 | Aqua dem. |
| B | q.s. | Citric acid |

### AI 5%

| | % | Ingredient (INCI) |
|---|---|---|
| A | 40.0 | Sodium laureth sulfate |
| | 5.0 | Decyl glucoside |
| | 5.0 | Cocamidopropylbetaine |
| | 5.0 | Aqueous solution with about 7% P18 |
| | 1.0 | Panthenol |
| | q.s. | Perfume oil |
| | q.s. | Preservative |
| | 2.0 | Sodium chloride |
| | 42.0 | Aqua dem. |
| B | q.s. | Citric acid |

[0335] Preparation: Mix the components of phase A and dissolve. Adjust the pH to 6-7 with citric acid.

### Example 32

### Shampoo

### AI 1%

| | % | Ingredient (INCI) |
|---|---|---|
| A | 40.0 | Sodium laureth sulfate |
| | 5.0 | Sodium C₁₂₋₁₅-pareth-15-sulfonate |
| | 5.0 | Decyl glucoside |
| | q.s. | Perfume oil |
| | 0.1 | Phytantriol |
| | 44.6 | Aqua dem. |
| | 1.0 | Aqueous solution with about 7% P18 |
| | 0.3 | Polyquaternium-10 |
| | 1.0 | Panthenol |
| | q.s. | Preservative |
| | 1.0 | Laureth-3 |
| | 2.0 | Sodium chloride |

### AI 5%

| | % | Ingredient (INCI) |
|---|---|---|
| A | 40.0 | Sodium laureth sulfate |
| | 5.0 | Sodium C₁₂₋₁₅-pareth-15-sulfonate |
| | 5.0 | Decyl glucoside |
| | q.s. | Perfume oil |
| | 0.1 | Phytantriol |
| | 40.6 | Aqua dem. |
| | 5.0 | Aqueous solution with about 7% P18 |
| | 0.3 | Polyquaternium-10 |
| | 1.0 | Panthenol |
| | q.s. | Preservative |
| | 1.0 | Laureth-3 |
| | 2.0 | Sodium chloride |

[0338] Preparation: Mix the components of phase A and dissolve. Adjust the pH to 6-7 with citric acid.

### Example 33

### Shampoo

### AI 1%

| | % | Ingredient (INCI) |
|---|---|---|
| A | 15.0 | Cocamidopropylbetaine |
| | 10.0 | Disodium cocoamphodiacetate |
| | 5.0 | Polysorbate 20 |
| | 5.0 | Decyl glucoside |
| | q.s. | Perfume oil |
| | q.s. | Preservative |
| | 1.0 | Aqueous solution with about 7% P18 |
| | 0.15 | Guar hydroxypropyltrimonium chloride |
| | 2.0 | Laureth-3 |
| | 58.0 | Aqua dem. |
| | q.s. | Citric acid |
| B | 3.0 | PEG-150 distearate |

### AI 5%

| | % | Ingredient (INCI) |
|---|---|---|
| A | 15.0 | Cocamidopropylbetaine |
| | 10.0 | Disodium cocoamphodiacetate |
| | 5.0 | Polysorbate 20 |
| | 5.0 | Decyl glucoside |
| | q.s. | Perfume oil |
| | q.s. | Preservative |
| | 5.0 | Aqueous solution with about 7% P18 |
| | 0.15 | Guar hydroxypropyltrimonium chloride |
| | 2.0 | Laureth-3 |
| | 54.0 | Aqua dem. |
| | q.s. | Citric acid |
| B | 3.0 | PEG-150 distearate |

[0341] Preparation: Weigh in the components of phase A and dissolve. Adjust the pH to 6-7. Add phase B and heat to about 50° C. With stirring, cool to room temperature.

### Example 34

### Moisturizing Bodycare Cream

### AI 1%

| | % | Ingredient (INCI) |
|---|---|---|
| A | 2.0 | Ceteareth-25 |
| | 2.0 | Ceteareth-6, stearyl alcohol |
| | 3.0 | Cetearyl ethylhexanoate |
| | 1.0 | Dimethicone |
| | 4.0 | Cetearyl alcohol |
| | 3.0 | Glyceryl stearate SE |
| | 5.0 | Mineral oil |
| | 4.0 | Simmondsia chinensis (jojoba) seed oil |
| | 3.0 | Mineral oil, lanolin alcohol |
| B | 5.0 | Propylene glycol |
| | 1.0 | Aqueous solution with about 7% P18 |
| | 1.0 | Panthenol |
| | 0.5 | Magnesium aluminum silicate |
| | q.s. | Preservative |
| | 65.5 | Aqua dem. |
| C | q.s. | Perfume oil |
| D | q.s. | Citric acid |

### AI 5%

| | % | Ingredient (INCI) |
|---|---|---|
| A | 2.0 | Ceteareth-25 |
| | 2.0 | Ceteareth-6, stearyl alcohol |
| | 3.0 | Cetearyl ethylhexanoate |
| | 1.0 | Dimethicone |
| | 4.0 | Cetearyl alcohol |
| | 3.0 | Glyceryl stearate SE |
| | 5.0 | Mineral oil |
| | 4.0 | Simmondsia chinensis (jojoba) seed oil |
| | 3.0 | Mineral oil, lanolin alcohol |
| B | 5.0 | Propylene glycol |
| | 5.0 | Aqueous solution with about 7% P18 |
| | 1.0 | Panthenol |
| | 0.5 | Magnesium aluminum silicate |
| | q.s. | Preservative |
| | 61.5 | Aqua dem. |
| C | q.s. | Perfume oil |
| D | q.s. | Citric acid |

[0344] Preparation: Heat phases A and B separately to about 80° C. Briefly prehomogenize phase B, then stir phase B into phase A and homogenize again. Cool to about 40° C., add phase C and homogenize well again. Adjust the pH to 6-7 with citric acid.

### Example 35

### Moisturizing Bodycare Cream

### AI 1%

| | % | Ingredient (INCI) |
|---|---|---|
| A | 6.0 | PEG-7-hydrogenated castor oil |
| | 10.0 | Cetearyl ethylhexanoate |
| | 5.0 | Isopropyl myristate |
| | 7.0 | Mineral oil |
| | 0.5 | Shea butter (Butyrospermum parkii) |
| | 0.5 | Aluminum stearate |
| | 0.5 | Magnesium stearate |
| | 0.2 | Bisabolol |
| | 0.7 | Quaternium-18 hectorite |
| B | 5.0 | Dipropylene glycol |
| | 0.7 | Magnesium sulfate |
| | q.s. | Preservative |
| | 62.9 | Aqua dem. |
| | q.s. | Perfume oil |
| C | 1.0 | Aqueous solution with about 7% P18 |

### AI 5%

| | % | Ingredient (INCI) |
|---|---|---|
| A | 6.0 | PEG-7-hydrogenated castor oil |
| | 10.0 | Cetearyl ethylhexanoate |
| | 5.0 | Isopropyl myristate |
| | 7.0 | Mineral oil |
| | 0.5 | Shea butter (Butyrospermum parkii) |
| | 0.5 | Aluminum stearate |
| | 0.5 | Magnesium stearate |
| | 0.2 | Bisabolol |
| | 0.7 | Quaternium-18 hectorite |
| B | 5.0 | Dipropylene glycol |
| | 0.7 | Magnesium sulfate |
| | q.s. | Preservative |
| | 58.9 | Aqua dem. |
| | q.s. | Perfume oil |
| C | 5.0 | Aqueous solution with about 7% P18 |

[0347] Preparation: Heat phases A and B separately to about 80° C. Stir phase B into phase A and homogenize. With stirring, cool to about 40° C., add phase C and homogenize again. With stirring, allow to cool to room temperature.

### Example 36

### Liquid Make-Up—O/W Type

### AI 1%

| | % | Ingredient (INCI) |
|---|---|---|
| A | 2.0 | Ceteareth-6, stearyl alcohol |
| | 2.0 | Ceteareth-25 |
| | 6.0 | Glyceryl stearate |
| | 1.0 | Cetyl alcohol |
| | 8.0 | Mineral oil |
| | 7.0 | Cetearyl ethylhexanoate |
| | 0.2 | Dimethicone |
| B | 3.0 | Propylene glycol |
| | 1.0 | Panthenol |
| | q.s. | Preservative |
| | 61.9 | Aqua dem. |
| C | 0.1 | Bisabolol |
| | 1.0 | Aqueous solution with about 7% P18 |
| | q.s. | Perfume oil |
| D | 5.7 | C.I. 77 891, titanium dioxide |
| | 1.1 | Iron oxides |

### AI 5%

| | % | Ingredient (INCI) |
|---|---|---|
| A | 2.0 | Ceteareth-6, stearyl alcohol |
| | 2.0 | Ceteareth-25 |
| | 6.0 | Glyceryl stearate |
| | 1.0 | Cetyl alcohol |
| | 8.0 | Mineral oil |
| | 7.0 | Cetearyl ethylhexanoate |
| | 0.2 | Dimethicone |
| B | 3.0 | Propylene glycol |
| | 1.0 | Panthenol |
| | q.s. | Preservative |
| | 57.9 | Aqua dem. |
| C | 0.1 | Bisabolol |
| | 5.0 | Aqueous solution with about 7% P18 |
| | q.s. | Perfume oil |
| D | 5.7 | C.I. 77 891, titanium dioxide |
| | 1.1 | Iron oxides |

[0350] Preparation: Heat phases A and B separately to about 80° C. Stir phase B into phase A and homogenize. With stirring, cool to about 40° C., add phases C and D and thoroughly homogenize again. With stirring, allow to cool to room temperature.

### Example 37

### Dermocosmetic Preparations

[0351] Dermocosmetic preparations according to the invention comprising the peptide P18 according to the invention are described below. The concentrations can vary according to the invention.

[0352] The data below are parts by weight.

[0353] (1) Clear Shampoo

| Ingredients (INCI) | 1 | 2 | 3 | 4 | 5 |
|---|---|---|---|---|---|
| Sodium laureth sulfate | 13.00 | 15.00 | 10.50 | 12.50 | 10.00 |
| Cocamidopropylbetaine | 7.50 | 7.00 | 5.00 | 5.50 | 10.00 |
| PEG-7 glyceryl cocoate | 2.00 | 2.50 | 3.50 | 5.00 | 2.30 |
| Perfume oil | 0.10 | 0.10 | 0.10 | 0.10 | 0.10 |
| P18 | 1.0 | 5.0 | 0.1 | 0.5 | 10.0 |
| D-Panthenol USP | 1.00 | 1.50 | 1.80 | 1.70 | 1.40 |
| Preservative | 0.10 | 0.10 | 0.10 | 0.10 | 0.10 |
| Citric acid | 0.10 | 0.10 | 0.10 | 0.10 | 0.10 |
| Luviquat ® Ultra Care | 1.50 | 1.00 | 1.50 | 1.20 | 1.10 |
| Sodium chloride | 1.50 | 1.40 | 1.40 | 1.30 | 1.50 |
| Aqua dem. | ad 100 | ad 100 | ad 100 | ad 100 | ad 100 |

[0354] (2) Shampoo

| Ingredients (INCI) | 1 | 2 | 3 | 4 | 5 |
|---|---|---|---|---|---|
| Sodium laureth sulfate | 35.00 | 40.00 | 30.00 | 45.00 | 27.00 |
| Decyl glucoside | 5.00 | 5.50 | 4.90 | 3.50 | 7.00 |
| Cocamidopropylbetaine | 10.00 | 5.00 | 12.50 | 7.50 | 15.00 |
| Perfume oil | 0.10 | 0.10 | 0.10 | 0.10 | 0.10 |
| P18 | 1.0 | 5.0 | 0.1 | 0.5 | 10.0 |
| D-Panthenol USP | 0.50 | 1.00 | 0.80 | 1.50 | 0.50 |
| Preservative | 0.10 | 0.10 | 0.10 | 0.10 | 0.10 |
| Citric acid | 0.10 | 0.10 | 0.10 | 0.10 | 0.10 |
| Laureth-3 | 0.50 | 2.00 | 0.50 | 0.50 | 2.00 |
| Sodium chloride | 1.50 | 1.50 | 1.50 | 1.50 | 1.50 |
| Aqua dem. | ad 100 | ad 100 | ad 100 | ad 100 | ad 100 |

[0355] (3) Clear Conditioner-Shampoo

| Ingredients (INCI) | 1 | 2 | 3 | 4 | 5 |
|---|---|---|---|---|---|
| ® Disodium | 10.00 | 15.00 | 20.00 | 12.00 | 17.00 |
| Cocoamphodiacetate | | | | | |
| ® Decyl Glucoside | 5.00 | 6.00 | 7.00 | 8.00 | 4.00 |
| ® Cocamidopropyl | 15.00 | 12.00 | 10.00 | 18.00 | 20.00 |
| Betaine | | | | | |
| Luviquat ® FC 550 | 0.30 | 0.20 | 0.20 | 0.20 | 0.30 |
| Perfume oil | 0.10 | 0.10 | 0.10 | 0.10 | 0.10 |
| P18 | 20.0 | 5.0 | 1.0 | 0.5 | 10.0 |
| Cremophor ® PS 20 | 5.00 | 1.00 | 1.00 | 7.00 | 5.00 |
| Preservative | 0.10 | 0.10 | 0.10 | 0.10 | 0.10 |
| ® Laureth-3 | 2.00 | 1.00 | 0.50 | 2.00 | 2.00 |
| Citric acid | 0.20 | 0.20 | 0.20 | 0.20 | 0.20 |
| PEG-12 distearate | 3.00 | 2.00 | 2.00 | 3.00 | 2.50 |
| Aqua dem. | ad 100 | ad 100 | ad 100 | ad 100 | ad 100 |

[0356] (4) Foam O/W Emulsions

| | Emulsion 1 | % by | Emulsion 2 | % by |
|---|---|---|---|---|
| | % by wt. | vol. | % by wt. | vol. |
| Stearic acid | 5.00 | | 1.00 | |
| Cetyl alcohol | 5.50 | | | |
| Cetearyl alcohol | | | 2.00 | |
| PEG-40 stearate | 8.50 | | | |
| PEG-20 stearate | | | 1.00 | |
| Caprylic/capric triglyceride | 4.00 | | 2.00 | |
| C₁₂₋₁₅-Alkyl benzoate | 10.00 | | 15.00 | |
| Cyclomethicone | 4.00 | | | |
| Dimethicone | | | 0.50 | |
| P18 | 5.0 | | 10.0 | |
| Ethylhexyl isostearate | | | 5.00 | |
| Myristyl myristate | | | 2.00 | |
| Ceresin | 1.50 | | | |
| Glycerol | | | 3.00 | |
| Hydroxypropyl starch | 1.00 | | 3.50 | |
| phosphate | | | | |
| BHT | | | 0.02 | |
| Disodium EDTA | 0.50 | | 0.10 | |
| Perfume oil, preservative | q.s. | | q.s. | |
| Colorant | q.s. | | q.s. | |
| Potassium hydroxide | q.s. | | q.s. | |
| Aqua dem. | ad 100 | | ad 100 | |
| | Adjust pH | | Adjust pH | |
| | to 6.5-7.5 | | to 5.0-6.0 | |
| Emulsion 1 | | 70 | | |
| Emulsion 2 | | | | 35 |
| Nitrogen | | 30 | | |
| Propane/butane | | | | 65 |

[0357] (5) Conditioner-Shampoo with Pearlescence

| | 1 | 2 | 3 |
|---|---|---|---|
| Polyquaternium-10 | 0.50 | 0.50 | 0.40 |
| Sodium laureth sulfate | 9.00 | 8.50 | 8.90 |
| Cocamidopropylbetaine | 2.50 | 2.60 | 3.00 |
| Uvinul ® MS 40 | 1.50 | 0.50 | 1.00 |
| P18 | 1.0 | 5.0 | 0.5 |
| Pearlescence solution | 2.00 | 2.50 | |
| Disodium EDTA | 0.10 | 0.15 | 0.05 |
| Preservative, perfume oil, thickener | q.s. | q.s. | q.s. |
| Aqua dem. | ad 100 | ad 100 | ad 100 |

Adjust pH to 6.0

[0358] (6) Clear conditioner-shampoo

| | 1 | 2 | 3 |
|---|---|---|---|
| Polyquaternium-10 | 0.50 | 0.50 | 0.50 |
| Sodium laureth sulfate | 9.00 | 8.50 | 9.50 |
| P18 | 5.0 | 0.1 | 3.0 |
| Uvinul M ® 40 | 1.00 | 1.50 | 0.50 |
| Preservative, perfume oil, thickener | q.s. | q.s. | q.s. |
| Aqua dem. | ad 100 | ad 100 | ad 100 |

Adjust pH to 6.0

[0359] (7) Clear Conditioner-Shampoo with Volume Effect

| | 1 | 2 | 3 |
|---|---|---|---|
| Sodium laureth sulfate | 10.00 | 10.50 | 11.00 |
| Uvinul ® MC 80 | 2.00 | 1.50 | 2.30 |
| P18 | 10.0 | 0.1 | 0.5 |
| Cocamidopropylbetaine | 2.50 | 2.60 | 2.20 |
| Disodium EDTA | 0.01 | 0.10 | 0.01 |
| Preservative, perfume oil, thickener | q.s. | q.s. | q.s. |
| Aqua dem. | ad 100 | ad 100 | ad 100 |

Adjust pH to 6.0

[0360] (8) Gel Cream

| | 1 | 2 | 3 | 4 |
|---|---|---|---|---|
| Acrylates/C₁₀₋₃₀-alkyl acrylate crosspolymer | 0.40 | 0.35 | 0.40 | 0.35 |
| Carbomer | 0.20 | 0.22 | 0.20 | 0.22 |
| Xanthan gum | 0.10 | 0.13 | 0.10 | 0.13 |
| Cetearyl alcohol | 3.00 | 2.50 | 3.00 | 2.50 |
| C₁₂₋₁₅-Alkyl benzoate | 4.00 | 4.50 | 4.00 | 4.50 |
| Caprylic/capric triglyceride | 3.00 | 3.50 | 3.00 | 3.50 |
| Uvinul ® A Plus ™ | 2.00 | 1.50 | 0.75 | 1.00 |
| UvaSorb ® k2A | | 3.00 | | |
| Ethylhexylbis- | | | | |
| isopentylbenzoxazolylphenylmelamine | | | | |
| Uvinul ® MC 80 | 3.00 | | 1.00 | |
| Bis-Ethylhexyloxyphenol | | 1.50 | | 2.00 |
| methoxyphenyltriazine | | | | |
| Butylmethoxydibenzoylmethane | | | 2.00 | |
| Disodium phenyldibenzimidazoletetrasulfonate | 2.50 | | 0.50 | 2.00 |
| Uvinul ® T 150 | 4.00 | | 3.00 | 4.00 |
| Octocrylene | | 4.00 | | |
| Diethylhexylbutamidotriazone | 1.00 | | | 2.00 |
| Phenylbenzimidazolesulfonic acid | 0.50 | | 3.00 | |
| Methylenebis- | 2.00 | | 0.50 | 1.50 |
| benzotriazolyltetramethylbutylphenol | | | | |
| Ethylhexyl salicylate | | | 3.00 | |
| Drometrizole trisiloxane | | | 0.50 | |
| Terephthalidenedicamphorsulfonic acid | | 1.50 | | 1.00 |
| Diethylhexyl 2,6-naphthalate | 3.50 | 4.00 | 7.00 | 9.00 |
| Titanium dioxide-microfine | 1.00 | | 3.00 | |
| Zinc oxide-microfine | | | | 0.25 |
| P18 | 0.1 | .5 | 1.0 | 0.02 |
| Cyclomethicone | 5.00 | 5.50 | 5.00 | 5.50 |
| Dimethicone | 1.00 | 0.60 | 1.00 | 0.60 |
| Glycerol | 1.00 | 1.20 | 1.00 | 1.20 |
| Sodium hydroxide | q.s. | q.s. | q.s. | q.s. |
| Preservative | 0.30 | 0.23 | 0.30 | 0.23 |
| Perfume oil | 0.20 | | 0.20 | |
| Aqua dem. | ad 100 | ad 100 | ad 100 | ad 100 |

Adjust pH to 6.0

[0361] (9) OW Sunscreen Formulation

| | 1 | 2 | 3 | 4 | 5 | 6 | 7 |
|---|---|---|---|---|---|---|---|
| Glyceryl stearate SE | 0.50 | 1.00 | 3.00 | | | 1.50 | |
| Glyceryl stearate citrate | 2.00 | | 1.00 | 2.00 | 4.00 | | |
| Stearic acid | | 3.00 | | 2.00 | | | |
| PEG-40 stearate | 0.50 | | | | | 2.00 | |
| Cetyl phosphate | | | | | | 1.00 | |
| Sodium cetearyl sulfate | | | | | | | 0.75 |
| Stearyl alcohol | | | 3.00 | | | 2.00 | 0.60 |
| Cetyl alcohol | 2.50 | 1.10 | | 1.50 | 0.60 | | 2.00 |
| P18 | 10.0 | 0.5 | 3.0 | 5.0 | 0.1 | 0.02 | 7.5 |
| Uvinul ® A Plus ™ | 2.00 | 1.50 | 0.75 | 1.00 | 2.10 | 4.50 | 5.00 |
| UvaSorb ® k2A | | | | | | | |
| Ethylhexylbisisopentyl- | | | | | | | |
| benzoxazolylphenylmelamine | | | | | | | |
| Ethylhexyl methoxycinnamate | | | | | 5.00 | 6.00 | 8.00 |
| Uvinul ® MC 80 | | | | | | | |
| Bisethylhexyloxyphenol | | 1.50 | | 2.00 | 2.50 | | 2.50 |
| methoxyphenyltriazine | | | | | | | |
| Butylmethoxydibenzoylmethane | | | 2.00 | | 2.00 | 1.50 | |
| Disodium | 2.50 | | 0.50 | 2.00 | | 0.30 | |
| phenyldibenzimidazole- | | | | | | | |
| tetrasulfonate | | | | | | | |
| Ethylhexyl Triazone Uvinul ® T | 4.00 | | 3.00 | 4.00 | | 2.00 | |
| 150 | | | | | | | |
| Octocrylene | | 4.00 | | | | | 7.50 |
| Diethylhexylbutamidotriazone | 1.00 | | | 2.00 | 1.00 | | 1.00 |
| Phenylbenzimidazolesulfonic | 0.50 | | 3.00 | | | | |
| acid | | | | | | | |
| Methylenebis- | 2.00 | | 0.50 | 1.50 | 2.50 | | |
| benzotriazolyltetramethylbutyl- | | | | | | | |
| phenol | | | | | | | |
| Ethylhexyl salicylate | | | 3.00 | | | | 5.00 |
| Drometrizole trisiloxane | | | 0.50 | | | 1.00 | |
| Terephthalidenedicamphor- | | 1.50 | | 1.00 | 1.00 | | 0.50 |
| sulfonic acid | | | | | | | |
| Diethylhexyl 2,6-naphthalate | 3.50 | | 7.00 | | 6.00 | 9.00 | |
| Titanium dioxide-microfine | 1.00 | | 3.00 | | 3.50 | | 1.50 |
| Zinc oxide-microfine | | | | 0.25 | | 2.00 | |
| C₁₂₋₁₅-Alkyl benzoate | | 0.25 | | | 4.00 | 7.00 | |
| Dicapryl ether | | | 3.50 | | 2.00 | | |
| Butylene glycol dicaprylate/ | 5.00 | | 6.00 | | | | |
| dicaprate | | | | | | | |
| Cocoglyceride | | | 6.00 | | 2.00 | | |
| Dimethicone | 0.50 | | 1.00 | | 2.00 | | |
| Cyclomethicone | 2.00 | | 0.50 | | 0.50 | | |
| Butyrospermum parkii (shea | | 2.00 | | | | | |
| butter) | | | | | | | |
| VP/hexadecene copolymer | 0.20 | | | 0.50 | | 1.00 | |
| Glycerol | 3.00 | 7.50 | | 7.50 | 5.00 | | 2.50 |
| Xanthan gum | 0.15 | | 0.05 | | | 0.30 | |
| Sodium carbomer | | 0.20 | | 0.15 | 0.25 | | |
| Vitamin E acetate | 0.60 | | 0.23 | | 0.70 | 1.00 | |
| Biosaccharide gum-1 | | 3.00 | 10.00 | | | | |
| Glycine soya (soybean) oil | | | | 0.50 | | 1.50 | 1.00 |
| Ethylhexylglycerol | 0.30 | | | | | | |
| DMDM hydantoin | | 0.60 | 0.40 | 0.20 | | | |
| Iodopropynyl butylcarbamate | | | | 0.18 | 0.20 | | |
| Methyl paraben | 0.15 | | 0.25 | | 0.50 | | |
| Phenoxyethanol | 1.00 | 0.40 | | | 0.40 | 0.50 | 0.40 |
| Trisodium EDTA | 0.02 | | 0.05 | | | | |
| Tetrasodium iminodisuccinate | | | | 0.25 | 1.00 | | |
| Ethanol | 2.00 | 1.50 | | 3.00 | | 1.20 | 5.00 |
| Perfume oil | 0.10 | 0.25 | 0.30 | | 0.40 | 0.20 | |
| Aqua dem. | ad 100 | ad 100 | ad 100 | ad 100 | ad 100 | ad 100 | ad 100 |

[0362] (10) Hydrodispersion

| | 1 | 2 | 3 | 4 | 5 |
|---|---|---|---|---|---|
| Ceteareth-20 | 1.00 | | | 0.50 | |
| Cetyl alcohol | | | 1.00 | | |
| Sodium carbomer | | 0.20 | | 0.30 | |
| Acrylates/C₁₀₋₃₀-alkyl acrylate | 0.50 | | 0.40 | 0.10 | 0.50 |
| crosspolymer | | | | | |
| Xanthan gum | | 0.30 | 0.15 | | |
| P18 | 5.0 | 0.5 | 3.0 | 0.1 | 10.0 |
| Uvinul ® A Plus ™ | 2.00 | 1.50 | 0.75 | 1.00 | 2.10 |
| UvaSorb ® k2A ethylhexylbis- | | 3.50 | | | |
| isopentylbenzoxazolylphenylmelamine | | | | | |
| Ethylhexyl methoxycinnamate Uvinul ® | | | | | 5.00 |
| MC 80 | | | | | |
| Bisethylhexyloxyphenol | | 1.50 | | 2.00 | 2.50 |
| methoxyphenyltriazine | | | | | |
| Butylmethoxydibenzoylmethane | | | 2.00 | | 2.00 |
| Disodium | 2.50 | | 0.50 | 2.00 | |
| phenyldibenzimidazoletetrasulfonate | | | | | |
| Ethylhexyltriazone Uvinul ® T 150 | 4.00 | | 3.00 | 4.00 | |
| Octocrylene | | 4.00 | | | |
| Diethylhexylbutamidotriazone | 1.00 | | | 2.00 | 1.00 |
| Phenylbenzimidazolesulfonic acid | 0.50 | | 3.00 | | |
| Methylenebis- | 2.00 | | 0.50 | 1.50 | 2.50 |
| benzotriazolyltetramethylbutylphenol | | | | | |
| Ethylhexyl salicylate | | | 3.00 | | |
| Drometrizole trisiloxane | | | 0.50 | | |
| Terephthalidenedicamphorsulfonic acid | | 1.50 | | 1.00 | 1.00 |
| Diethylhexyl 2,6-naphthalate | | | 7.00 | | 9.00 |
| Titanium dioxide-microfine | 1.00 | | 3.00 | | 3.50 |
| Zinc oxide-microfine | | | | 0.25 | |
| C₁₂₋₁₅-Alkyl benzoate | 2.00 | 2.50 | | | |
| Dicapryl ether | | 4.00 | | | |
| Butylene glycol dicaprylate/dicaprate | 4.00 | | 2.00 | 6.00 | |
| Dicapryl carbonate | | 2.00 | 6.00 | | |
| Dimethicone | | 0.50 | 1.00 | | |
| Phenyltrimethicone | 2.00 | | 0.50 | | |
| Butyrospermum parkii (shea butter) | | 2.00 | | 5.00 | |
| VP/hexadecene copolymer | 0.50 | | | 0.50 | 1.00 |
| Tricontanyl-PVP | 0.50 | | 1.00 | | |
| Ethylhexylglycerol | | | 1.00 | | 0.80 |
| Glycerol | 3.00 | 7.50 | | 7.50 | 8.50 |
| Glycine soya (soybean) oil | | | 1.50 | | 1.00 |
| Vitamin E acetate | 0.50 | | 0.25 | | 1.00 |
| Glucosylrutin | 0.60 | | | 0.25 | |
| Biosaccharide gum-1 | | 2.50 | 0.50 | | 2.00 |
| DMDM hydantoin | | 0.60 | 0.45 | 0.25 | |
| Iodopropynyl butylcarbamate | 0.20 | | | | |
| Methyl paraben | 0.50 | | 0.25 | 0.15 | |
| Phenoxyethanol | 0.50 | 0.40 | | 1.00 | |
| Trisodium EDTA | | 0.01 | 0.05 | | 0.10 |
| Ethanol | 3.00 | 2.00 | 1.50 | | 7.00 |
| Perfume oil | 0.20 | | 0.05 | 0.40 | |
| Aqua dem. | ad 100 | ad 100 | ad 100 | ad 100 | ad 100 |

[0363] (11) WO Sunscreen Emulsion

| | 1 | 2 | 3 | 4 | 5 |
|---|---|---|---|---|---|
| Cetyldimethicone | | 2.50 | | 4.00 | |
| Polyglyceryl-2 dipolyhydroxystearate | 5.00 | | | | 4.50 |
| PEG-30 dipolyhydroxystearate | | | 5.00 | | |
| P18 | 5.0 | 1.0 | 10.0 | 0.5 | 0.1 |
| Uvinul ® A Plus ™ | 2.00 | 1.50 | 0.75 | 1.00 | 2.10 |
| UvaSorb ® k2A | | 2.00 | | | |
| Ethylhexylbis- | | | | | |
| isopentylbenzoxazolylphenylmelamine | | | | | |
| Ethylhexyl methoxycinnamate Uvinul ® | | | | | 5.00 |
| MC 80 | | | | | |
| Bisethylhexyloxyphenol methoxyphenyl- | | 1.50 | | 2.00 | 2.50 |
| triazine | | | | | |
| Butylmethoxydibenzoylmethane | | | 2.00 | | 2.00 |
| Disodium | 2.50 | | 0.50 | 2.00 | |
| phenyldibenzimidazoletetrasulfonate | | | | | |
| Ethylhexyltriazone Uvinul ® T 150 | 4.00 | | 3.00 | 4.00 | |
| Octocrylene | | 4.00 | | | |
| Diethylhexylbutamidotriazone | 1.00 | | | 2.00 | 1.00 |
| Phenylbenzimidazolesulfonic acid | 0.50 | | 3.00 | | |
| Methylenebisbenzotriazolyltetra- | 2.00 | | 0.50 | 1.50 | 2.50 |
| methylbutylphenol | | | | | |
| Ethylhexyl salicylate | | | 3.00 | | |
| Drometrizole trisiloxane | | | 0.50 | | |
| Terephthalidenedicamphorsulfonic acid | | 1.50 | | 1.00 | 1.00 |
| Diethylhexyl 2,6-naphthalate | | | 7.00 | | 4.00 |
| Titanium dioxide-microfine | 1.00 | | 3.00 | | 3.50 |
| Zinc oxide-microfine | | | | 0.25 | |
| Mineral oil | | 12.00 | 10.00 | | 8.00 |
| C₁₂₋₁₅-Alkyl benzoate | | | | 9.00 | |
| Dicaprylyl ether | 10.00 | | | | 7.00 |
| Butylene glycol dicaprylate/dicaprate | | | 2.00 | 8.00 | 4.00 |
| Dicaprylyl carbonate | 5.00 | | 6.00 | | |
| Dimethicone | | 4.00 | 1.00 | 5.00 | |
| Cyclomethicone | 2.00 | 25.00 | | | 2.00 |
| Butyrospermum parkii (shea butter) | | | 3.00 | | |
| Petrolatum | | 4.50 | | | |
| VP/hexadecene copolymer | 0.50 | | | 0.50 | 1.00 |
| Ethylhexylglycerol | | 0.30 | 1.00 | | 0.50 |
| Glycerol | 3.00 | 7.50 | | 7.50 | 8.50 |
| Glycine soya (soybean) oil | | 1.00 | 1.50 | | 1.00 |
| Magnesium sulfate MgSO₄ | 1.00 | 0.50 | | 0.50 | |
| Magnesium chloride MgCl₂ | | | 1.00 | | 0.70 |
| Vitamin E acetate | 0.50 | | 0.25 | | 1.00 |
| Ascorbyl palmitate | 0.50 | | | 2.00 | |
| Biosaccharide gum-1 | | | | 3.50 | 1.00 |
| DMDM hydantoin | | 0.60 | 0.40 | 0.20 | |
| Methyl paraben | 0.50 | | 0.25 | 0.15 | |
| Phenoxyethanol | 0.50 | 0.40 | | 1.00 | |
| Trisodium EDTA | 0.12 | 0.05 | | 0.30 | |
| Ethanol | 3.00 | | 1.50 | | 5.00 |
| Perfume oil | 0.20 | | 0.40 | 0.35 | |
| Aqua dem. | ad 100 | ad 100 | ad 100 | ad 100 | ad 100 |

[0364] (12) Sticks

| | 1 | 2 | 3 | 4 |
|---|---|---|---|---|
| Caprylic/capric triglyceride | 12.00 | 10.00 | 6.00 | |
| Octyldodecanol | 7.00 | 14.00 | 8.00 | 3.00 |
| Butylene glycol dicaprylate/ | | | | 12.00 |
| dicaprate | | | | |
| Pentaerythrityl tetraisostearate | 10.00 | 6.00 | 8.00 | 7.00 |
| Polyglyceryl-3 diisostearate | 2.50 | | | |
| Bisdiglyceryl polyacyladipate-2 | 9.00 | 8.00 | 10.00 | 8.00 |
| Cetearyl alcohol | 8.00 | 11.00 | 9.00 | 7.00 |
| Myristyl myristate | 3.50 | 3.00 | 4.00 | 3.00 |
| Beeswax | 5.00 | 5.00 | 6.00 | 6.00 |
| Copernicia cerifera (carnauba) | 1.50 | 2.00 | 2.00 | 1.50 |
| wax | | | | |
| Cera alba | 0.50 | 0.50 | 0.50 | 0.40 |
| C₁₆₋₄₀ Alkyl stearate | | 1.50 | 1.50 | 1.50 |
| P18 | 0.5 | 3.0 | 1.0 | 5.0 |
| Uvinul ® A Plus ™ | 2.00 | 1.50 | 0.75 | 9.00 |
| UvaSorb ® k2A | | 2.00 | | 4.00 |
| Ethylhexylbis- | | | | |
| isopentylbenzoxazolylphenyl- | | | | |
| melamine | | | | |
| Ethylhexyl methoxycinnamate | | 3.00 | | |
| Uvinul ® MC 80 | | | | |
| Bis-Ethylhexyloxyphenol | | 1.50 | | 2.00 |
| methoxyphenyltriazine | | | | |
| Butylmethoxydibenzoylmethane | | | 2.00 | |
| Disodium phenyldibenzimidazole- | 2.50 | | 0.50 | 2.00 |
| tetrasulfonate | | | | |
| Ethylhexyltriazone | 4.00 | | 3.00 | 4.00 |
| Uvinul ® T 150 | | | | |
| Octocrylene | | 4.00 | | |
| Diethylhexylbutamidotriazone | 1.00 | | | 2.00 |
| Phenylbenzimidazolesulfonic acid | 0.50 | | 3.00 | |
| Methylenebis- | 2.00 | | 0.50 | 1.50 |
| benzotriazolyltetramethyl- | | | | |
| butylphenol | | | | |
| Ethylhexyl salicylate | | | 3.00 | |
| Drometrizole trisiloxane | | | 0.50 | |
| Terephthalidenedicamphorsulfonic | | 1.50 | | 1.00 |
| acid | | | | |
| Diethylhexyl 2,6-naphthalate | | | 7.00 | |
| Titanium dioxide-microfine | 1.00 | | 3.00 | |
| Zinc oxide-microfine | | | | 0.25 |
| Vitamin E acetate | 0.50 | 1.00 | | |
| Ascorbyl palmitate | 0.05 | | 0.05 | |
| Buxux chinensis (jojoba) oil | 2.00 | 1.00 | | 1.00 |
| Perfume oil, BHT | 0.10 | 0.25 | | 0.35 |
| Ricinus communis (castor) oil | ad 100 | ad 100 | ad 100 | ad 100 |

[0365] (13) PIT Emulsion

| | 1 | 2 | 3 | 4 | 5 | 6 | 7 | 8 |
|---|---|---|---|---|---|---|---|---|
| Glyceryl | 0.50 | 2.00 | 3.00 | 5.00 | | 0.50 | 4.00 | |
| monostearate SE | | | | | | | | |
| Glyceryl isostearate | | | | | 3.50 | 4.00 | 2.00 | |
| Isoceteth-20 | | 0.50 | | | 2.00 | | | |
| Ceteareth-12 | | 5.00 | | 1.00 | | | 3.50 | 5.00 |
| Ceteareth-20 | | 5.00 | | 1.00 | | | | 3.50 |
| PEG-100 stearate | | | | 2.80 | | 2.30 | 3.30 | |
| Cetyl alcohol | 5.20 | | 1.20 | 1.00 | 1.30 | | 0.50 | 0.30 |
| Cetyl palmitate | 2.50 | 1.20 | | 1.50 | | 0.50 | | 1.50 |
| Cetyldimethicone | | | | 0.50 | | 1.00 | | |
| copolyol | | | | | | | | |
| Polyglyceryl-2 | | | | 0.75 | 0.30 | | | |
| dioleate | | | | | | | | |
| P18 | 0.1 | 5.0 | 0.01 | 0.5 | 3.0 | 0.25 | 10.0 | 3.0 |
| Uvinul ® A Plus ™ | 2.00 | 1.50 | 0.75 | 1.00 | 2.10 | 4.50 | 5.00 | 2.10 |
| UvaSorb ® k2A | | | 4.00 | | | | 1.50 | |
| Ethylhexylbisiso- | | | | | | | | |
| pentylbenzoxazolyl- | | | | | | | | |
| phenylmelamine | | | | | | | | |
| Ethylhexyl | | | | | 5.00 | 6.00 | 8.00 | 5.00 |
| methoxycinnamate | | | | | | | | |
| Uvinul ® MC 80 | | | | | | | | |
| Bisethylhexyloxy- | | 1.50 | | 2.00 | 2.50 | | 2.50 | 2.50 |
| phenol methoxy- | | | | | | | | |
| phenyltriazine | | | | | | | | |
| Butylmethoxy- | | | 2.00 | | 2.00 | 1.50 | | 2.00 |
| dibenzoylmethane | | | | | | | | |
| Disodium | 2.50 | | 0.50 | 2.00 | | 0.30 | | |
| phenyldibenzimid- | | | | | | | | |
| azoletetrasulfonate | | | | | | | | |
| Ethylhexyltriazone | 4.00 | | 3.00 | 4.00 | | 2.00 | | |
| Uvinul ® T 150 | | | | | | | | |
| Octocrylene | | 4.00 | | | | | 7.50 | |
| Diethylhexylbutamidotriazone | 1.00 | | | 2.00 | 1.00 | | 1.00 | 1.00 |
| Phenylbenzimidazole | 0.50 | | 3.00 | | | | | |
| sulfonic acid | | | | | | | | |
| Methylenebis- | 2.00 | | 0.50 | 1.50 | 2.50 | | | 2.50 |
| benzotriazolyltetra- | | | | | | | | |
| methylbutylphenol | | | | | | | | |
| Ethylhexyl salicylate | | | 3.00 | | | | 5.00 | |
| Drometrizole | | | 0.50 | | | 1.00 | | |
| trisiloxane | | | | | | | | |
| Terephthalidene- | | 1.50 | | 1.00 | 1.00 | | 0.50 | 1.00 |
| dicamphorsulfonic | | | | | | | | |
| acid | | | | | | | | |
| Diethylhexyl 2,6- | | | 7.00 | | 10.00 | 7.50 | | 8.00 |
| naphthalate | | | | | | | | |
| Titanium dioxide- | 1.00 | | 3.00 | | 3.50 | | 1.50 | 3.50 |
| microfine | | | | | | | | |
| Zinc oxide-microfine | | | | 0.25 | | 2.00 | | |
| C₁₂₋₁₅-Alkyl benzoate | 3.50 | | | 6.35 | | | | 0.10 |
| Cocoglyceride | | 3.00 | | 3.00 | | | | 1.00 |
| Dicapryl ether | 4.50 | | | | | | | |
| Dicaprylyl carbonate | | 4.30 | | 3.00 | | | | 7.00 |
| Dibutyl adipate | | | | 0.50 | | | | 0.30 |
| Phenyltrimethicone | 2.00 | | | 3.50 | | 2.00 | | |
| Cyclomethicone | | 3.00 | | | | | | |
| C₁₋₅ | | 0.50 | | | 2.00 | | | |
| Alkylgalactomannan | | | | | | | | |
| Hydrogenated | | | | | 3.00 | 4.00 | | |
| cocoglyceride | | | | | | | | |
| Behenoxy- | | | | | | 1.50 | 2.00 | |
| dimethicone | | | | | | | | |
| VP/hexadecene | | | | 1.00 | 1.20 | | | |
| copolymer | | | | | | | | |
| Glycerol | 4.00 | 6.00 | 5.00 | | 8.00 | 10.00 | | |
| Vitamin E acetate | 0.20 | 0.30 | 0.40 | | 0.30 | | | |
| Butyrospermum | | 2.00 | | 3.60 | | 2.00 | | |
| parkii (shea butter) | | | | | | | | |
| Iodopropyl | 0.12 | | | | 0.20 | | | |
| butylcarbamate | | | | | | | | |
| Biosaccharide gum-1 | | | | 0.10 | | | | |
| DMDM hydantoin | 0.10 | | | | 0.12 | | 0.13 | |
| Methyl paraben | | 0.50 | 0.30 | | 0.35 | | | |
| Phenoxyethanol | 0.50 | 0.40 | | 1.00 | | | | |
| Ethylhexylglycerol | | 0.30 | | | 1.00 | | 0.35 | |
| Ethanol | 2.00 | | 2.00 | | | 5.00 | | |
| Trisodium EDTA | 0.40 | | 0.15 | | | 0.20 | | |
| Perfume oil | 0.20 | | 0.20 | | 0.24 | 0.16 | 0.10 | 0.10 |
| Aqua dem. | ad 100 | ad 100 | ad 100 | ad 100 | ad 100 | ad 100 | ad 100 | ad 100 |

[0366] (14) Gel Cream

| | 1 | 2 | 3 | 4 |
|---|---|---|---|---|
| Acrylates/C₁₀₋₃₀-alkyl acrylate | 0.40 | 0.35 | 0.40 | 0.35 |
| crosspolymer | | | | |
| Carbomer | 0.20 | 0.22 | 0.20 | 0.22 |
| Luvigel ® EM | 1.50 | 2.50 | 2.80 | 3.50 |
| Xanthan gum | 0.10 | 0.13 | 0.10 | 0.13 |
| Cetearyl alcohol | 3.00 | 2.50 | 3.00 | 2.50 |
| C₁₂₋₁₅-Alkyl benzoate | 4.00 | 4.50 | 4.00 | 4.50 |
| Caprylic/capric triglyceride | 3.00 | 3.50 | 3.00 | 3.50 |
| Titanium dioxide-microfine | 1.00 | | 1.50 | |
| Zinc oxide-microfine | | 2.00 | | 0.25 |
| P18 | 0.5 | 10.0 | 3.0 | 5.0 |
| Dihydroxyacetone | | | 3.00 | 5.00 |
| Cyclomethicone | 5.00 | 5.50 | 5.00 | 5.50 |
| Dimethicone | 1.00 | 0.60 | 1.00 | 0.60 |
| Glycerol | 1.00 | 1.20 | 1.00 | 1.20 |
| Sodium hydroxide | q.s. | q.s. | q.s. | q.s. |
| Preservative | 0.30 | 0.23 | 0.30 | 0.23 |
| Perfume oil | 0.20 | | 0.20 | |
| Aqua dem. | ad 100 | ad 100 | ad 100 | ad 100 |

Adjust pH to 6.0

[0367] (15) OW Self-Tanning Formulations

| | 1 | 2 | 3 | 4 | 5 | 6 | 7 |
|---|---|---|---|---|---|---|---|
| Glyceryl monostearate SE | 0.50 | 1.00 | 3.00 | | | 1.50 | |
| Glyceryl stearate citrate | 2.00 | | 1.00 | 2.00 | 4.00 | | |
| Stearic acid | | 3.00 | | 2.00 | | | |
| PEG-40 stearate | 0.50 | | | | | 2.00 | |
| Cetyl phosphate | | | | | | 1.00 | |
| Cetearyl sulfate | | | | | | | 0.75 |
| Stearyl alcohol | | | 3.00 | | | 2.00 | 0.60 |
| Cetyl alcohol | 2.50 | 1.10 | | 1.50 | 0.60 | | 2.00 |
| P18 | 0.1 | 0.5 | 0.025 | 5.0 | 3.0 | 10.0 | 1.0 |
| Dihydroxyacetone | | | 3.00 | 5.00 | | 4 | |
| Titanium dioxide-microfine | 1.00 | | | | 1.50 | | 1.50 |
| Zinc oxide-microfine | | | | 0.25 | | 2.00 | |
| C₁₂₋₁₅-Alkyl benzoate | | 0.25 | | | 4.00 | 7.00 | |
| Dicapryl ether | | | 3.50 | | 2.00 | | |
| Butylene glycol | 5.00 | | 6.00 | | | | |
| dicaprylate/dicaprate | | | | | | | |
| Cocoglyceride | | | 6.00 | | 2.00 | | |
| Dimethicone | 0.50 | | 1.00 | | 2.00 | | |
| Cyclomethicone | 2.00 | | 0.50 | | 0.50 | | |
| Butyrospermum parkii | | 2.00 | | | | | |
| (shea butter) | | | | | | | |
| VP/hexadecene copolymer | 0.20 | | | 0.50 | | 1.00 | |
| Glycerol | 3.00 | 7.50 | | 7.50 | 5.00 | | 2.50 |
| Xanthan gum | 0.15 | | 0.05 | | | 0.30 | |
| Sodium carbomer | | 0.20 | | 0.15 | 0.25 | | |
| Vitamin E acetate | 0.60 | | 0.23 | | 0.70 | 1.00 | |
| Biosaccharide gum-1 | | 3.00 | 10.00 | | | | |
| Glycine soya (soybean) oil | | | | 0.50 | | 1.50 | 1.00 |
| Ethylhexylglycerol | 0.30 | | | | | | |
| DMDM hydantoin | | 0.60 | 0.40 | 0.20 | | | |
| Iodopropynyl | | | | 0.18 | 0.20 | | |
| butylcarbamate | | | | | | | |
| Methyl paraben | 0.15 | | 0.25 | | 0.50 | | |
| Phenoxyethanol | 1.00 | 0.40 | | | 0.40 | 0.50 | 0.40 |
| Trisodium EDTA | 0.02 | | 0.05 | | | | |
| Tetrasodium | | | | 0.25 | 1.00 | | |
| iminodisuccinate | | | | | | | |
| Ethanol | 2.00 | 1.50 | | 3.00 | | 1.20 | 5.00 |
| Perfume oil | 0.10 | 0.25 | 0.30 | | 0.40 | 0.20 | |
| Aqua dem. | ad 100 | ad 100 | ad 100 | ad 100 | ad 100 | ad 100 | ad 100 |

[0368] (16) OW Make-Up

| | 1 | 2 | 3 | 4 | 5 | 6 | 7 |
|---|---|---|---|---|---|---|---|
| Glyceryl monostearate SE | 0.50 | 1.00 | 3.00 | | | 1.50 | |
| Glyceryl stearate citrate | 2.00 | | 1.00 | 2.00 | 4.00 | | |
| Stearic acid | | 3.00 | | 2.00 | | | |
| PEG-40 stearate | 0.50 | | | | | 2.00 | |
| Cetyl phosphate | | | | | | 1.00 | |
| Cetearyl sulfate | | | | | | | 0.75 |
| Stearyl alcohol | | | 3.00 | | | 2.00 | 0.60 |
| Cetyl alcohol | 2.50 | 1.10 | | 1.50 | 0.60 | | 2.00 |
| P18 | 3.0 | 5.0 | 2.0 | 0.5 | 1.0 | 5.0 | 10.0 |
| Titanium dioxide | 10.00 | 12.00 | 9.00 | 8.50 | 11.00 | 9.50 | 10.00 |
| Iron oxide | 2.00 | 4.00 | 3.00 | 5.00 | 3.40 | 6.00 | 4.40 |
| Zinc oxide | | 4.00 | | 2.00 | | 3.00 | |
| C₁₂₋₁₅-Alkyl benzoate | | 0.25 | | | 4.00 | 7.00 | |
| Dicapryl ether | | | 3.50 | | 2.00 | | |
| Butylene glycol | 5.00 | | 6.00 | | | | |
| dicaprylate/dicaprate | | | | | | | |
| Cocoglyceride | | | 6.00 | | 2.00 | | |
| Dimethicone | 0.50 | | 1.00 | | 2.00 | | |
| Cyclomethicone | 2.00 | | 0.50 | | 0.50 | | |
| Butyrospermum parkii | | 2.00 | | | | | |
| (shea butter) | | | | | | | |
| VP/hexadecene copolymer | 0.20 | | | 0.50 | | 1.00 | |
| Glycerol | 3.00 | 7.50 | | 7.50 | 5.00 | | 2.50 |
| Xanthan gum | 0.15 | | 0.05 | | | 0.30 | |
| Sodium carbomer | | 0.20 | | 0.15 | 0.25 | | |
| Vitamin E acetate | 0.60 | | 0.23 | | 0.70 | 1.00 | |
| Glycine soya (soybean) oil | | | | 0.50 | | 1.50 | 1.00 |
| Ethylhexylglycerol | 0.30 | | | | | | |
| DMDM hydantoin | | 0.60 | 0.40 | 0.20 | | | |
| Iodopropynyl | | | | 0.18 | 0.20 | | |
| butylcarbamate | | | | | | | |
| Methyl paraben | 0.15 | | 0.25 | | 0.50 | | |
| Phenoxyethanol | 1.00 | 0.40 | | | 0.40 | 0.50 | 0.40 |
| Trisodium EDTA | 0.02 | | 0.05 | | | | |
| Tetrasodium | | | | 0.25 | 1.00 | | |
| iminodisuccinate | | | | | | | |
| Ethanol | 2.00 | 1.50 | | 3.00 | | 1.20 | 5.00 |
| Perfume oil | 0.10 | 0.25 | 0.30 | | 0.40 | 0.20 | |
| Aqua dem. | ad 100 | ad 100 | ad 100 | ad 100 | ad 100 | ad 100 | ad 100 |

[0369] (17) Self-Tannins Hydrodispersion

| | 1 | 2 | 3 | 4 | 5 |
|---|---|---|---|---|---|
| Ceteareth-20 | 1.00 | | | 0.50 | |
| Cetyl alcohol | | | 1.00 | | |
| Luvigel ® EM | | 2.00 | | 2.50 | 2.00 |
| Acrylates/C₁₀₋₃₀-alkyl acrylate | 0.50 | | 0.40 | 0.10 | 0.50 |
| crosspolymer | | | | | |
| Xanthan gum | | 0.30 | 0.15 | | |
| P18 | 3.0 | 1.0 | 0.5 | 0.1 | 5.0 |
| Dihydroxyacetone | | | 3.00 | 5.00 | |
| Uvinul ® A Plus ™ | 2.00 | 1.50 | 0.75 | 1.00 | 2.10 |
| Titanium dioxide-microfine | 1.00 | | 1.00 | | 1.00 |
| Zinc oxide-microfine | | 1.90 | | 0.25 | |
| C₁₂₋₁₅-Alkyl benzoate | 2.00 | 2.50 | | | |
| Dicapryl ether | | 4.00 | | | |
| Butylene glycol dicaprylate/dicaprate | 4.00 | | 2.00 | 6.00 | |
| Dicapryl carbonate | | 2.00 | 6.00 | | |
| Dimethicone | | 0.50 | 1.00 | | |
| Phenyltrimethicone | 2.00 | | 0.50 | | |
| Butyrospermum parkii (shea butter) | | 2.00 | | 5.00 | |
| VP/hexadecene copolymer | 0.50 | | | 0.50 | 1.00 |
| Tricontanyl-PVP | 0.50 | | 1.00 | | |
| Ethylhexylglycerol | | | 1.00 | | 0.80 |
| Glycerol | 3.00 | 7.50 | | 7.50 | 8.50 |
| Glycine soya (soybean) oil | | | 1.50 | | 1.00 |
| Vitamin E acetate | 0.50 | | 0.25 | | 1.00 |
| Glucosylrutin | 0.60 | | | 0.25 | |
| DMDM hydantoin | | 0.60 | 0.45 | 0.25 | |
| Iodopropynyl butylcarbamate | 0.20 | | | | |
| Methyl paraben | 0.50 | | 0.25 | 0.15 | |
| Phenoxyethanol | 0.50 | 0.40 | | 1.00 | |
| Trisodium EDTA | | 0.01 | 0.05 | | 0.10 |
| Ethanol | 3.00 | 2.00 | 1.50 | | 7.00 |
| Perfume oil | 0.20 | | 0.05 | 0.40 | |
| Aqua dem. | ad 100 | ad 100 | ad 100 | ad 100 | ad 100 |

[0370] (18) Aftersun Hydrodispersion

| | 1 | 2 | 3 | 4 | 5 |
|---|---|---|---|---|---|
| Ceteareth-20 | 1.00 | | | 0.50 | |
| Cetyl alcohol | | | 1.00 | | |
| Luvigel ® EM | | 2.00 | | 2.50 | 2.00 |
| Acrylates/C₁₀₋₃₀-alkyl | 0.50 | 0.30 | 0.40 | 0.10 | 0.50 |
| acrylate crosspolymer | | | | | |
| Xanthan gum | | 0.30 | 0.15 | | |
| P18 | 0.1 | 5.0 | 0.5 | 3.0 | 1.0 |
| C₁₂₋₁₅-Alkyl benzoate | 2.00 | 2.50 | | | |
| Dicapryl ether | | 4.00 | | | |
| Butylene glycol | 4.00 | | 2.00 | 6.00 | |
| dicaprylate/dicaprate | | | | | |
| Dicapryl carbonate | | 2.00 | 6.00 | | |
| Dimethicone | | 0.50 | 1.00 | | |
| Phenyltrimethicone | 2.00 | | 0.50 | | |
| Tricontanyl-PVP | 0.50 | | 1.00 | | |
| Ethylhexylglycerol | | | 1.00 | | 0.80 |
| Glycerol | 3.00 | 7.50 | | 7.50 | 8.50 |
| Glycine soya | | | 1.50 | | 1.00 |
| (soybean) oil | | | | | |
| Vitamin E acetate | 0.50 | | 0.25 | | 1.00 |
| Glucosylrutin | 0.60 | | | 0.25 | |
| Trisodium EDTA | | 0.01 | 0.05 | | 0.10 |
| Ethanol | 15.00 | 10.00 | 8.00 | 12.00 | 9.00 |
| Perfume oil | 0.20 | | 0.05 | 0.40 | |
| Aqua dem. | ad 100 | ad 100 | ad 100 | ad 100 | ad 100 |

[0371] (19) WO Emulsions

| | 1 | 2 | 3 | 4 | 5 |
|---|---|---|---|---|---|
| Cetyldimethicone | | 2.50 | | 4.00 | |
| Polyglyceryl-2 | 5.00 | | | | 4.50 |
| dipolyhydroxystearate | | | | | |
| PEG-30 | | | 5.00 | | |
| dipolyhydroxystearate | | | | | |
| P18 | 5.0 | 10.0 | 0.1 | 0.5 | 1.0 |
| Uvinul ® A Plus ™ | 2.00 | 1.50 | 0.75 | 1.00 | 2.10 |
| Titanium | 1.00 | | 3.00 | | 3.50 |
| dioxide-microfine | | | | | |
| Zinc oxide-microfine | | 0.90 | | 0.25 | |
| Mineral oil | | 12.00 | 10.00 | | 8.00 |
| C₁₂₋₁₅-Alkyl benzoate | | | | 9.00 | |
| Dicaprylyl ether | 10.00 | | | | 7.00 |
| Butylene glycol | | | 2.00 | 8.00 | 4.00 |
| dicaprylate/dicaprate | | | | | |
| Dicaprylyl carbonate | 5.00 | | 6.00 | | |
| Dimethicone | | 4.00 | 1.00 | 5.00 | |
| Cyclomethicone | 2.00 | 25.00 | | | 2.00 |
| Butyrospermum parkii | | | 3.00 | | |
| (shea butter) | | | | | |
| Vaseline | | 4.50 | | | |
| VP/hexadecene | 0.50 | | | 0.50 | 1.00 |
| copolymer | | | | | |
| Ethylhexylglycerol | | 0.30 | 1.00 | | 0.50 |
| Glycerol | 3.00 | 7.50 | | 7.50 | 8.50 |
| Glycine soya | | 1.00 | 1.50 | | 1.00 |
| (soybean) oil | | | | | |
| Magnesium sulfate | 1.00 | 0.50 | | 0.50 | |
| Magnesium chloride | | | 1.00 | | 0.70 |
| Vitamin E acetate | 0.50 | | 0.25 | | 1.00 |
| Ascorbyl palmitate | 0.50 | | | 2.00 | |
| Biosaccaride gum-1 | | | | 3.50 | 7.00 |
| DMDM hydantoin | | 0.60 | 0.40 | 0.20 | |
| Methyl paraben | 0.50 | | 0.25 | 0.15 | |
| Phenoxyethanol | 0.50 | 0.40 | | 1.00 | |
| Trisodium EDTA | 0.12 | 0.05 | | 0.30 | |
| Ethanol | 3.00 | | 1.50 | | 5.00 |
| Perfume oil | 0.20 | | 0.40 | 0.35 | |
| Aqua dem. | ad 100 | ad 100 | ad 100 | ad 100 | ad 100 |

[0372] (20) Solids-Stabilized Emulsion (Pickering Emulsions)

| | 1 | 2 | 3 | 4 | 5 |
|---|---|---|---|---|---|
| Mineral oil | | | 16.00 | 16.00 | |
| Octyldodecanol | 9.00 | 9.00 | 5.00 | | |
| Caprylic/capric triglyceride | 9.00 | 9.00 | 6.00 | | |
| C₁₂₋₁₅-Alkyl benzoate | | | | 5.00 | 8.00 |
| Butylene glycol dicaprylate/dicaprate | | | | | 8.00 |
| Dicaprylyl ether | 9.00 | | | 4.00 | |
| Dicaprylyl carbonate | | 9.00 | | | |
| Hydroxyoctacosanyl hydroxystearate | 2.00 | 2.00 | 2.20 | 2.50 | 1.50 |
| Disteardimonium hectorite | 1.00 | 0.75 | | 0.50 | 0.25 |
| Cera microcristallina + paraffinum | | 0.35 | | | 5.00 |
| liquidum | | | | | |
| Hydroxypropylmethylcellulose | | | 0.10 | | 0.05 |
| Dimethicone | | | | | 3.00 |
| P18 | 1.0 | 0.5 | 0.1 | 3.0 | 5.0 |
| Titanium dioxide + aluminum oxide + | | 3.00 | | | |
| simethicone + aqua | | | | | |
| Titanium dioxide + | | 2.00 | 4.00 | 2.00 | 4.00 |
| trimethoxycaprylylsilane | | | | | |
| Silicon dimethylsilylate | 2.50 | | | 6.00 | 2.50 |
| Boron nitride | | | 1.00 | | |
| Starch/sodium metaphosphate polymer | 2.00 | | | | |
| Manioc starch or tapioca | | 0.50 | | | |
| Sodium chloride | 5.00 | 7.00 | 8.50 | 3.00 | 4.50 |
| Glycerol | | | | 1.00 | |
| Trisodium EDTA | 1.00 | 1.00 | 1.00 | 1.00 | 1.00 |
| Vitamin E acetate | 5.00 | 10.00 | 3.00 | 6.00 | 10.00 |
| Ascorbyl palmitate | 1.00 | 1.00 | | 1.00 | |
| Methyl paraben | | 0.60 | | | 0.20 |
| Propyl paraben | | | | | 0.20 |
| Phenoxyethanol | | | 0.20 | | |
| Hexamidine diisethionate | | | 0.40 | 0.50 | 0.40 |
| Diazolidinylurea | | | | | 0.08 |
| Ethanol | | | 0.23 | 0.20 | |
| Perfume oil | 5.00 | | 3.00 | 4.00 | |
| Aqua dem. | 0.20 | | 0.30 | 0.10 | |
| | ad 100 | ad 100 | ad 100 | ad 100 | ad 100 |

[0373] (21) Sticks

| | 1 | 2 | 3 | 4 |
|---|---|---|---|---|
| Caprylic/capric triglyceride | 12.00 | 10.00 | 6.00 | |
| Octyldodecanol | 7.00 | 14.00 | 8.00 | 3.00 |
| Butylene glycol dicaprylate/ | | | | 12.00 |
| dicaprate | | | | |
| Pentaerythrityl tetraisostearate | 10.00 | 6.00 | 8.00 | 7.00 |
| Polyglyceryl-3 diisostearate | 2.50 | | | |
| Bisdiglyceryl polyacyladipate-2 | 9.00 | 8.00 | 10.00 | 8.00 |
| Cetearyl alcohol | 8.00 | 11.00 | 9.00 | 7.00 |
| Myristyl myristate | 3.50 | 3.00 | 4.00 | 3.00 |
| Beeswax | 5.00 | 5.00 | 6.00 | 6.00 |
| Copernicia cerifera (carnauba) | 1.50 | 2.00 | 2.00 | 1.50 |
| wax | | | | |
| Cera Alba | 0.50 | 0.50 | 0.50 | 0.40 |
| C₁₆₋₄₀-Alkyl stearate | | 1.50 | 1.50 | 1.50 |
| P18 | 10.0 | 1.0 | 3.0 | 0.1 |
| Uvinul ® A Plus ™ | 2.00 | 1.50 | 0.75 | 9.00 |
| Titanium dioxide-microfine | 1.00 | | 3.00 | |
| Zinc oxide-microfine | | 1.00 | | 0.25 |
| Vitamin E acetate | 0.50 | 1.00 | | |
| Ascorbyl palmitate | 0.05 | | 0.05 | |
| Buxux chinensis (jojoba) oil | 2.00 | 1.00 | | 1.00 |
| Perfume oil, BHT | 0.10 | 0.25 | | 0.35 |
| Ricinus communis (castor) oil | ad 100 | ad 100 | ad 100 | ad 100 |

[0374] (22) Self-Tanning PIT Emulsions

| | 1 | 2 | 3 | 4 | 5 | 6 | 7 | 8 |
|---|---|---|---|---|---|---|---|---|
| Glyceryl monostearate SE | 0.50 | 2.00 | 3.00 | 5.00 | | 0.50 | 4.00 | |
| Glyceryl isostearate | | | | | 3.50 | 4.00 | 2.00 | |
| Isoceteth-20 | | 0.50 | | | 2.00 | | | |
| Ceteareth-12 | | 5.00 | | 1.00 | | | 3.50 | 5.00 |
| Ceteareth-20 | | 5.00 | | 1.00 | | | | 3.50 |
| PEG-100 stearate | | | | 2.80 | | 2.30 | 3.30 | |
| Cetyl alcohol | 5.20 | | 1.20 | 1.00 | 1.30 | | 0.50 | 0.30 |
| Cetyl palmitate | 2.50 | 1.20 | | 1.50 | | 0.50 | | 1.50 |
| Cetyldimethicone copolyol | | | | 0.50 | | 1.00 | | |
| Polyglyceryl-2 | | | | 0.75 | 0.30 | | | |
| P18 | 0.1 | 0.5 | 0.01 | 5.0 | 0.5 | 3.0 | 0.025 | 10.0 |
| Dihydroxyacetone | | | 3.00 | 5.00 | | | 4.00 | |
| Uvinul ® A Plus ™ | 2.00 | 1.50 | 0.75 | 1.00 | 2.10 | 4.50 | 5.00 | 2.10 |
| Titanium dioxide-microfine | 1.00 | | 1.50 | | 3.50 | | 1.50 | 1.00 |
| Zinc oxide-microfine | | 1.00 | | 0.25 | | 2.00 | | 1.50 |
| C₁₂₋₁₅-Alkyl benzoate | 3.50 | | | 6.35 | | | | 0.10 |
| Cocoglyceride | | 3.00 | | 3.00 | | | | 1.00 |
| Dicapryl ether | 4.50 | | | | | | | |
| Dicaprylyl carbonate | | 4.30 | | 3.00 | | | | 7.00 |
| Dibutyl adipate | | | | 0.50 | | | | 0.30 |
| Phenyltrimethicone | 2.00 | | | 3.50 | | 2.00 | | |
| Cyclomethicone | | 3.00 | | | | | | |
| C₁₋₅-Alkylgalactomannan | | 0.50 | | | 2.00 | | | |
| Hydrogenated cocoglyceride | | | | | 3.00 | 4.00 | | |
| Behenoxydimethicone | | | | | | 1.50 | 2.00 | |
| VP/hexadecene copolymer | | | | 1.00 | 1.20 | | | |
| Glycerol | 4.00 | 6.00 | 5.00 | | 8.00 | 10.00 | | |
| Vitamin E acetate | 0.20 | 0.30 | 0.40 | | 0.30 | | | |
| Butyrosperumu parkii (shea | | 2.00 | | 3.60 | | 2.00 | | |
| butter) | | | | | | | | |
| Iodopropyl butylcarbamate | 0.12 | | | | 0.20 | | | |
| DMDM hydantoin | 0.10 | | | | 0.12 | | 0.13 | |
| Methyl paraben | | 0.50 | 0.30 | | 0.35 | | | |
| Phenoxyethanol | 0.50 | 0.40 | | 1.00 | | | | |
| Ethylhexylglycerol | | 0.30 | | | 1.00 | | 0.35 | |
| Ethanol | 2.00 | | 2.00 | | | 5.00 | | |
| Trisodium EDTA | 0.40 | | 0.15 | | | 0.20 | | |
| Perfume oil | 0.20 | | 0.20 | | 0.24 | 0.16 | 0.10 | 0.10 |
| Aqua dem. | ad 100 | ad 100 | ad 100 | ad 100 | ad 100 | ad 100 | ad 100 | ad 100 |

[0375] (23) Oil Gel

| | 1 | 2 | 3 | 4 |
|---|---|---|---|---|
| Caprylic/capric triglycerides | 12.00 | 10.00 | 6.00 | |
| Octyldodecanol | 7.00 | 14.00 | 8.00 | 3.00 |
| Butylene glycol | | | | 12.00 |
| dicaprylate/dicaprate | | | | |
| Pentaerythrityl tetraisostearate | 10.00 | 6.00 | 8.00 | 7.00 |
| Polyglyceryl-3 diisostearate | 2.50 | | | |
| Bisdiglyceryl polyacyladipate-2 | 9.00 | 8.00 | 10.00 | 8.00 |
| Myristyl myristate | 3.50 | 3.00 | 4.00 | 3.00 |
| Quaternium-18 bentonite | 5.00 | 5.00 | 6.00 | 6.00 |
| Propylene carbonate | 15.00 | 20.00 | 18.00 | 19.50 |
| P18 | 1.0 | 0.5 | 3.0 | 5.0 |
| Vitamin acetate | 0.50 | 1.00 | | |
| Ascorbyl palmitate | 0.05 | | 0.05 | |
| Buxus chinensis (jojoba) oil | 2.00 | 1.00 | | 1.00 |
| Perfume oil, BHT | 0.10 | 0.25 | | 0.35 |
| Ricinus communis (castor) oil | ad 100 | ad 100 | ad 100 | ad 100 |

### Example 38

### Cosmetic Sunscreen Preparations

[0376] The formulations below describe cosmetic sunscreen preparations comprising a combination of at least one inorganic pigment, preferably zinc oxide and/or titanium dioxide, and organic UV-A and UV-B filters.

[0377] The formulations given below are prepared in a customary manner known to the person skilled in the art.

[0378] The content of P18 refers to 100% of active ingredient. The active ingredient according to the invention can either be used in pure form or in the form of an aqueous solution. In the case of the aqueous solution, the content of water dem. in the particular formulation has to be adjusted.

(1)

| | | | |
|---|---|---|---|
| A | 7.50 | Uvinul MC 80 | Ethylhexyl cinnamate |
| | 2.00 | Uvinul M 40 | Benzophenone-3 |
| | 0.80 | Rylo PG 11 | Polyglyceryl dimer soyate |
| | 1.00 | Span 60 | Sorbitan stearate |
| | 0.50 | Vitamin E acetate | Tocopheryl acetate |
| | 3.00 | Dracorin 100 SE | Glyceryl stearate, PEG-100 stearate |
| | 1.00 | Cremophor CO 410 | PEG-40-hydrogenated castor oil |
| B | 3.00 | T-Lite SF | Titanium dioxide, aluminum oxide |
| | | | hydrate, dimethicone/methicone |
| | | | copolymer |
| | 1.00 | Cetiol SB 45 | Butyrospermum parkii (shea butter) |
| | 6.50 | Finsolv TN | C₁₂₋₁₅-Alkyl benzoate |
| C | 5.00 | Butylene glycol | Butylene glycol |
| | 0.30 | Keltrol | Xanthan gum |
| | 0.10 | Edeta BD | Disodium EDTA |
| | 0.10 | Allantoin | Allantoin |
| | 66.20 | Water dem. | Aqua dem. |
| D | 1.00 | Sepigel 305 | Polyacrylamide, C₁₃₋₁₄-isoparaffin, |
| | | | laureth-7 |
| | 1% | P18 | |
| | q.s. | | Preservative |

(2)

| | | | |
|---|---|---|---|
| A | 7.50 | Uvinul MC 80 | Ethylhexyl cinnamate |
| | 2.00 | Uvinul M 40 | Benzophenone-3 |
| | 0.80 | Rylo PG 11 | Polyglyceryl dimer soyate |
| | 1.00 | Span 60 | Sorbitan stearate |
| | 0.50 | Vitamin E acetate | Tocopheryl acetate |
| | 3.00 | Dracorin 100 SE | Glyceryl stearate, PEG-100 stearate |
| | 1.00 | Cremophor CO 410 | PEG-40-hydrogenated castor oil |
| B | 3.00 | Z-COTE MAX | Zinc oxide (and) |
| | | | diphenylcaprylmethicone |
| | 1.00 | Cetiol SB 45 | Butyrospermum parkii (shea butter) |
| | 6.50 | Finsolv TN | C₁₂₋₁₅-Alkyl benzoate |
| C | 5.00 | Butylene glycol | Butylene glycol |
| | 0.30 | Keltrol | Xanthan gum |
| | 0.10 | Edeta BD | Disodium EDTA |
| | 0.10 | Allantoin | Allantoin |
| | 66.20 | Water dem. | Aqua dem. |
| D | 2.00 | Simulgel NS | Hydroxyethyl acrylate/sodium |
| | | | acryloyldimethyltaurate copolymer, |
| | | | squalane, polysorbate 60 |
| | 1% | P18 | |
| | q.s. | | Preservative |

(3)

| | | | |
|---|---|---|---|
| A | 7.50 | Uvinul MC 80 | Ethylhexyl cinnamate |
| | 2.00 | Uvinul A Plus | Diethylaminohydroxybenzoylhexyl |
| | | | benzoate |
| | 0.80 | Rylo PG 11 | Polyglyceryl dimer soyate |
| | 1.00 | Span 60 | Sorbitan stearate |
| | 0.50 | Vitamin E acetate | Tocopheryl acetate |
| | 3.00 | Dracorin 100 SE | Glyceryl stearate, PEG-100 stearate |
| | 1.00 | Cremophor CO 410 | PEG-40-hydrogenated castor oil |
| B | 3.00 | Z-COTE MAX | Zinc oxide (and) |
| | | | diphenylcaprylmethicone |
| | 1.00 | Cetiol SB 45 | Butyrospermum parkii (shea butter) |
| | 6.50 | Finsolv TN | C₁₂₋₁₅-Alkyl benzoate |
| C | 5.00 | Butylene glycol | Butylene glycol |
| | 0.30 | Keltrol | Xanthan gum |
| | 0.10 | Edeta BD | Disodium EDTA |
| | 0.10 | Allantoin | Allantoin |
| | 66.20 | Water dem. | Aqua dem. |
| D | 2.00 | Simulgel NS | Hydroxyethyl acrylate/sodium |
| | | | acryloyldimethyltaurate copolymer, |
| | | | squalane, polysorbate 60 |
| | 1% | P18 | |
| | q.s. | | Preservative |

(4)

| | | | |
|---|---|---|---|
| A | 4.00 | Uvinul MC 80 | Ethylhexyl cinnamate |
| | 2.00 | Uvinul T 150 | Ethylhexyltriazone |
| | 2.00 | Uvinul A Plus | Diethylaminohydroxybenzoylhexyl |
| | | | benzoate |
| | 0.80 | Rylo PG 11 | Polyglyceryl dimer soyate |
| | 1.00 | Span 60 | Sorbitan stearate |
| | 0.50 | Vitamin E acetate | Tocopheryl acetate |
| | 3.00 | Dracorin 100 SE | Glyceryl stearate, PEG-100 stearate |
| | 1.00 | Cremophor CO 410 | PEG-40-hydrogenated castor oil |
| B | 3.00 | Z-COTE MAX | Zinc oxide (and) |
| | | | diphenylcaprylmethicone |
| | 1.00 | Cetiol SB 45 | Butyrospermum parkii (shea butter) |
| | 6.50 | Finsolv TN | C₁₂₋₁₅-Alkyl benzoate |
| C | 5.00 | Butylene glycol | Butylene glycol |
| | 0.30 | Keltrol | Xanthan gum |
| | 0.10 | Edeta BD | Disodium EDTA |
| | 0.10 | Allantoin | Allantoin |
| | 66.20 | Water dem. | Aqua dem. |
| D | 2.00 | Simulgel NS | Hydroxyethyl acrylate/sodium |
| | | | acryloyldimethyltaurate copolymer, |
| | | | squalane, polysorbate 60 |
| | 1% | P18 | |
| | q.s. | | Preservative |

(5)

| | | | |
|---|---|---|---|
| A | 4.00 | Uvinul MC 80 | Ethylhexyl cinnamate |
| | 2.00 | Uvinul T 150 | Ethylhexyltriazone |
| | 2.00 | Uvinul A Plus | Diethylaminohydroxybenzoylhexyl |
| | | | benzoate |
| | 0.80 | Rylo PG 11 | Polyglyceryl dimer soyate |
| | 1.00 | Span 60 | Sorbitan stearate |
| | 0.50 | Vitamin E acetate | Tocopheryl acetate |
| | 3.00 | Dracorin 100 SE | Glyceryl stearate, PEG-100 stearate |
| | 1.00 | Cremophor CO 410 | PEG-40-hydrogenated castor oil |
| B | 3.00 | T-Lite SF | Titanium dioxide, aluminum hydrate, |
| | | | dimethicone/methicone copolymer |
| | 1.00 | Cetiol SB 45 | Butyrospermum parkii (shea butter) |
| | 6.50 | Finsolv TN | C₁₂₋₁₅-Alkyl benzoate |
| C | 5.00 | Butylene glycol | Butylene glycol |
| | 0.30 | Keltrol | Xanthan gum |
| | 0.10 | Edeta BD | Disodium EDTA |
| | 0.10 | Allantoin | Allantoin |
| | 66.20 | Water dem. | Aqua dem. |
| D | 2.00 | Simulgel NS | Hydroxyethyl acrylate/sodium |
| | | | acryloyldimethyltaurate copolymer, |
| | | | squalane, polysorbate 60 |
| | 1% | P18 | |
| | q.s. | | Preservative |

(6)

| | | | |
|---|---|---|---|
| A | 4.00 | Uvinul MC 80 | Ethylhexyl cinnamate |
| | 2.00 | Uvinul T 150 | Ethylhexyltriazone |
| | 2.00 | Uvinul A Plus | Diethylaminohydroxybenzoylhexyl |
| | | | benzoate |
| | 0.80 | Rylo PG 11 | Polyglyceryl dimer soyate |
| | 1.00 | Span 60 | Sorbitan stearate |
| | 0.50 | Vitamin E acetate | Tocopheryl acetate |
| | 3.00 | Dracorin 100 SE | Glyceryl stearate, PEG-100 stearate |
| | 1.00 | Cremophor CO 410 | PEG-40-hydrogenated castor oil |
| B | 3.00 | Z-COTE MAX | Zinc oxide (and) |
| | | | diphenylcaprylmethicone |
| | 1.00 | Cetiol SB 45 | Butyrospermum parkii (shea butter) |
| | 6.50 | Finsolv TN | C₁₂₋₁₅-Alkyl benzoate |
| C | 5.00 | Butylene glycol | Butylene glycol |
| | 0.30 | Keltrol | Xanthan gum |
| | 0.10 | Edeta BD | Disodium EDTA |
| | 0.10 | Allantoin | Allantoin |
| | 66.20 | Water dem. | Aqua dem. |
| D | 2.00 | Simulgel NS | Hydroxyethyl acrylate/sodium |
| | | | acryloyldimethyltaurate copolymer, |
| | | | squalane, polysorbate 60 |
| | 1% | P18 | |
| | q.s. | | Preservative |

(7)

| | | | |
|---|---|---|---|
| A | 4.00 | Uvinul MC 80 | Ethylhexyl cinnamate |
| | 1.00 | Uvinul T 150 | Ethylhexyltriazone |
| | 2.00 | Parsol 1789 | Butylmethoxydibenzoylmethane |
| | 0.80 | Rylo PG 11 | Polyglyceryl dimer soyate |
| | 1.00 | Span 60 | Sorbitan stearate |
| | 0.50 | Vitamin E acetate | Tocopheryl acetate |
| | 3.00 | Dracorin 100 SE | Glyceryl stearate, PEG-100 stearate |
| | 1.00 | Cremophor CO 410 | PEG-40-hydrogenated castor oil |
| B | 3.00 | T-Lite SF-S | Titanium dioxide, silicon hydrate, |
| | | | aluminum hydrate, methicone/ |
| | | | dimethicone copolymer |
| | 1.00 | Cetiol SB 45 | Butyrospermum parkii (shea butter) |
| | 6.50 | Finsolv TN | C₁₂₋₁₅-Alkyl benzoate |
| C | 5.00 | Butylene glycol | Butylene glycol |
| | 0.30 | Keltrol | Xanthan gum |
| | 0.10 | Edeta BD | Disodium EDTA |
| | 0.10 | Allantoin | Allantoin |
| | 66.70 | Water dem. | Aqua dem. |
| D | 2.00 | Simulgel NS | Hydroxyethyl acrylate/sodium |
| | | | acryloyldimethyltaurate copolymer, |
| | | | squalane, polysorbate 60 |
| | 0.5% | P18 | |
| | q.s. | | Preservative |

(8)

| | | | |
|---|---|---|---|
| A | 4.00 | Uvinul MC 80 | Ethylhexyl cinnamate |
| | 1.00 | Uvinul T 150 | Ethylhexyltriazone |
| | 2.00 | Parsol 1789 | Butylmethoxydibenzoylmethane |
| | 0.80 | Rylo PG 11 | Polyglyceryl dimer soyate |
| | 1.00 | Span 60 | Sorbitan stearate |
| | 0.50 | Vitamin E acetate | Tocopheryl acetate |
| | 3.00 | Dracorin 100 SE | Glyceryl stearate, PEG-100 stearate |
| | 1.00 | Cremophor CO 410 | PEG-40-hydrogenated castor oil |
| B | 3.00 | Z-COTE MAX | Zinc oxide (and) |
| | | | diphenylcaprylmethicone |
| | 1.00 | Cetiol SB 45 | Butyrospermum parkii (shea butter) |
| | 6.50 | Finsolv TN | C₁₂₋₁₅-Alkyl benzoate |
| C | 5.00 | Butylene glycol | Butylene glycol |
| | 0.30 | Keltrol | Xanthan gum |
| | 0.10 | Edeta BD | Disodium EDTA |
| | 0.10 | Allantoin | Allantoin |
| | 67.10 | Water dem. | Aqua dem. |
| D | 2.00 | Simulgel NS | Hydroxyethyl acrylate/sodium |
| | | | acryloyldimethyltaurate copolymer, |
| | | | squalane, polysorbate 60 |
| | 0.1% | P18 | |
| | q.s. | | Preservative |

(9)

| | | | |
|---|---|---|---|
| A | 5.00 | Uvinul N 539 T | Octocrylene |
| | 2.00 | Parsol 1789 | Butylmethoxydibenzoylmethane |
| | 0.80 | Rylo PG 11 | Polyglyceryl dimer soyate |
| | 1.00 | Span 60 | Sorbitan stearate |
| | 0.50 | Vitamin E acetate | Tocopheryl acetate |
| | 3.00 | Dracorin 100 SE | Glyceryl stearate, PEG-100 stearate |
| | 1.00 | Cremophor CO 410 | PEG-40-hydrogenated castor oil |
| B | 3.00 | T-Lite SF-S | Titanium dioxide, silicon hydrate, |
| | | | aluminum hydrate, methicone/ |
| | | | dimethicone copolymer |
| | 1.00 | Cetiol SB 45 | Butyrospermum parkii (shea butter) |
| | 6.50 | Finsolv TN | C₁₂₋₁₅-Alkyl benzoate |
| C | 5.00 | Butylene glycol | Butylene glycol |
| | 0.30 | Keltrol | Xanthan gum |
| | 0.10 | Edeta BD | Disodium EDTA |
| | 0.10 | Allantoin | Allantoin |
| | 66.20 | Water dem. | Aqua dem. |
| D | 2.00 | Simulgel NS | Hydroxyethyl acrylate/sodium |
| | | | acryloyldimethyltaurate copolymer, |
| | | | squalane, polysorbate 60 |
| | 1% | P18 | |
| | q.s. | | Preservative |

(10)

| | | | |
|---|---|---|---|
| A | 5.00 | Uvinul N 539 T | Octocrylene |
| | 2.00 | Uvinul A Plus | Diethylaminohydroxybenzoylhexyl |
| | | | benzoate |
| | 0.80 | Rylo PG 11 | Polyglyceryl dimer soyate |
| | 1.00 | Span 60 | Sorbitan stearate |
| | 0.50 | Vitamin E acetate | Tocopheryl acetate |
| | 3.00 | Dracorin 100 SE | Glyceryl stearate, PEG-100 stearate |
| | 1.00 | Cremophor CO 410 | PEG-40-hydrogenated castor oil |
| B | 3.00 | T-Lite SF | Titanium dioxide, aluminum hydrate, |
| | | | dimethicone/methicone copolymer |
| | 1.00 | Cetiol SB 45 | Butyrospermum parkii (shea butter) |
| | 6.50 | Finsolv TN | C₁₂₋₁₅-Alkyl benzoate |
| C | 5.00 | Butylene glycol | Butylene glycol |
| | 0.30 | Keltrol | Xanthan gum |
| | 0.10 | Edeta BD | Disodium EDTA |
| | 0.10 | Allantoin | Allantoin |
| | 65.20 | Water dem. | Aqua dem. |
| D | 2.00 | Simulgel NS | Hydroxyethyl acrylate/sodium |
| | | | acryloyldimethyltaurate copolymer, |
| | | | squalane, polysorbate 60 |
| | 2% | P18 | |
| | q.s. | | Preservative |

(11)

| | | | |
|---|---|---|---|
| A | 5.00 | Uvinul N 539 T | Octocrylene |
| | 2.00 | Uvinul A Plus | Diethylaminohydroxybenzoylhexyl |
| | | | benzoate |
| | 0.80 | Rylo PG 11 | Polyglyceryl dimer soyate |
| | 1.00 | Span 60 | Sorbitan stearate |
| | 0.50 | Vitamin E acetate | Tocopheryl acetate |
| | 3.00 | Dracorin 100 SE | Glyceryl stearate, PEG-100 stearate |
| | 1.00 | Cremophor CO 410 | PEG-40-hydrogenated castor oil |
| B | 3.00 | Z-COTE MAX | Zinc oxide (and) |
| | | | diphenylcaprylmethicone |
| | 1.00 | Cetiol SB 45 | Butyrospermum parkii (shea butter) |
| | 6.50 | Finsolv TN | C₁₂₋₁₅-Alkyl benzoate |
| C | 5.00 | Butylene glycol | Butylene glycol |
| | 0.30 | Keltrol | Xanthan gum |
| | 0.10 | Edeta BD | Disodium EDTA |
| | 0.10 | Allantoin | Allantoin |
| | 66.70 | Water dem. | Aqua dem. |
| D | 2.00 | Simulgel NS | Hydroxyethyl acrylate/sodium |
| | | | acryloyldimethyltaurate copolymer, |
| | | | squalane, polysorbate 60 |
| | 0.5% | P18 | |
| | q.s. | | Preservative |

(12)

| | | | |
|---|---|---|---|
| A | 5.00 | Uvinul N 539 T | Octocrylene |
| | 2.00 | Uvinul A Plus | Diethylaminohydroxybenzoylhexyl |
| | | | benzoate |
| | 0.80 | Rylo PG 11 | Polyglyceryl dimer soyate |
| | 1.00 | Span 60 | Sorbitan stearate |
| | 0.50 | Vitamin E acetate | Tocopheryl acetate |
| | 3.00 | Dracorin 100 SE | Glyceryl stearate, PEG-100 stearate |
| | 1.00 | Cremophor CO 410 | PEG-40-hydrogenated castor oil |
| B | 3.00 | Z-COTE MAX | Zinc oxide (and) |
| | | | diphenylcaprylmethicone |
| | 1.00 | Cetiol SB 45 | Butyrospermum parkii (shea butter) |
| | 6.50 | Finsolv TN | C₁₂₋₁₅-Alkyl benzoate |
| C | 5.00 | Butylene glycol | Butylene glycol |
| | 0.30 | Keltrol | Xanthan gum |
| | 0.10 | Edeta BD | Disodium EDTA |
| | 0.10 | Allantoin | Allantoin |
| | 2.0 | Mexoryl SX | Terephthalidenedicamphorsulfonic acid |
| | 66.20 | Water dem. | Aqua dem. |
| D | 2.00 | Simulgel NS | Hydroxyethyl acrylate/sodium |
| | | | acryloyldimethyltaurate copolymer, |
| | | | squalane, polysorbate 60 |
| | 1% | P18 | |
| | q.s. | | Preservative |

(13)

| | | | |
|---|---|---|---|
| A | 5.00 | Uvinul N 539 T | Octocrylene |
| | 2.00 | Uvinul A Plus | Diethylaminohydrobenzoylhexyl |
| | | | benzoate |
| | 0.80 | Rylo PG 11 | Polyglyceryl dimer soyate |
| | 1.00 | Span 60 | Sorbitan stearate |
| | 0.50 | Vitamin E acetate | Tocopheryl acetate |
| | 3.00 | Dracorin 100 SE | Glyceryl stearate, PEG-100 stearate |
| | 1.00 | Cremophor CO 410 | PEG-40-hydrogenated castor oil |
| B | 3.00 | Z-COTE MAX | Zinc oxide (and) |
| | | | diphenylcaprylmethicone |
| | 1.00 | Cetiol SB 45 | Butyrospermum parkii (shea butter) |
| | 6.50 | Finsolv TN | C₁₂₋₁₅-Alkyl benzoate |
| C | 5.00 | Butylene glycol | Butylene glycol |
| | 0.30 | Keltrol | Xanthan gum |
| | 0.10 | Edeta BD | Disodium EDTA |
| | 0.10 | Allantoin | Allantoin |
| | 2.0 | Mexoryl SX | Terephthalidenedicamphorsulfonic acid |
| | 65.20 | Water dem. | Aqua dem. |
| D | 2.00 | Simulgel NS | Hydroxyethyl acrylate/sodium |
| | | | acryloyldimethyltaurate copolymer, |
| | | | squalane, polysorbate 60 |
| | 2% | P18 | |
| | q.s. | | Preservative |

(14)

| | | | |
|---|---|---|---|
| A | 5.00 | Uvinul N 539 T | Octocrylene |
| | 2.00 | Uvinul A Plus | Diethylaminohydroxybenzoylhexyl |
| | | | benzoate |
| | 2.00 | Mexoryl XL | Drometrizole trisiloxane |
| | 0.80 | Rylo PG 11 | Polyglyceryl dimer soyate |
| | 1.00 | Span 60 | Sorbitan stearate |
| | 0.50 | Vitamin E acetate | Tocopheryl acetate |
| | 3.00 | Dracorin 100 SE | Glyceryl stearate, PEG-100 stearate |
| | 1.00 | Cremophor CO 410 | PEG-40-hydrogenated castor oil |
| B | 3.00 | Z-COTE MAX | Zinc oxide (and) |
| | | | diphenylcaprylmethicone |
| | 1.00 | Cetiol SB 45 | Butyrospermum parkii (shea butter) |
| | 6.50 | Finsolv TN | C₁₂₋₁₅-Alkyl benzoate |
| C | 5.00 | Butylene glycol | Butylene glycol |
| | 0.30 | Keltrol | Xanthan gum |
| | 0.10 | Edeta BD | Disodium EDTA |
| | 0.10 | Allantoin | Allantoin |
| | 67.10 | Water dem. | Aqua dem. |
| D | 2.00 | Simulgel NS | Hydroxyethyl acrylate/sodium |
| | | | acryloyldimethyltaurate copolymer, |
| | | | squalane,polysorbate 60 |
| | 0.1% | P18 | |
| | q.s. | | Preservative |

(15)

| | | | |
|---|---|---|---|
| A | 5.00 | Uvinul N 539 T | Octocrylene |
| | 2.00 | Tinosorb S | Bisethylhexyloxyphenol |
| | | | methoxyphenyltriazine |
| | 0.80 | Rylo PG 11 | Polyglyceryl dimer soyate |
| | 1.00 | Span 60 | Sorbitan stearate |
| | 0.50 | Vitamin E acetate | Tocopheryl acetate |
| | 3.00 | Dracorin 100 SE | Glyceryl stearate, PEG-100 stearate |
| | 1.00 | Cremophor CO 410 | PEG-40-hydrogenated castor oil |
| B | 3.00 | Z-COTE MAX | Zinc oxide (and) |
| | | | diphenylcaprylmethicone |
| | 1.00 | Cetiol SB 45 | Butyrospermum parkii (shea butter) |
| | 6.50 | Finsolv TN | C₁₂₋₁₅-Alkyl benzoate |
| C | 5.00 | Butylene glycol | Butylene glycol |
| | 0.30 | Keltrol | Xanthan gum |
| | 0.10 | Edeta BD | Disodium EDTA |
| | 0.10 | Allantoin | Allantoin |
| | 66.20 | Water dem. | Aqua dem. |
| D | 2.00 | Simulgel NS | Hydroxyethyl acrylate/sodium |
| | | | acryloyldimethyltaurate copolymer, |
| | | | squalane, polysorbate 60 |
| | 1% | P18 | |
| | q.s. | | Preservative |

(16)

| | | | |
|---|---|---|---|
| A | 7.50 | Uvinul MC 80 | Ethylhexyl methoxycinnamate |
| | 5.00 | Uvinul N 539 T | Octocrylene |
| | 3.00 | Emulgade PL 68/50 | Cetearyl glucoside, cetearyl alcohol |
| | 2.00 | Dracorin 100 SE | Glyceryl stearate, PEG-100 stearate |
| | 1.00 | Fitoderm | Squalane |
| | 0.50 | Cremophor WO 7 | PEG-7-hydrogenated castor oil |
| | 0.50 | Cremophor PS 20 | Polysorbate 20 |
| | 2.00 | Dry Flo Pure | Aluminum starch octenyl succinate |
| B | 5.00 | Z-COTE MAX | Zinc oxide (and) |
| | | | diphenylcaprylmethicone |
| C | 4.00 | 1,2-Propylene | Propylene glycol |
| | | glycol Care | |
| | 0.20 | Keltrol | Xanthan gum |
| | 0.50 | Simulgel 600 | Acrylamide/sodium |
| | | | acryloyldimethyltaurate copolymer, |
| | | | isohexadecane, polysorbate 80 |
| | ad 100 | Water dem. | Aqua dem. |
| | q.s. | Preservative | |
| | 0.50 | Vitamin E acetate | Tocopheryl acetate |
| | 2% | P18 | |
| | 1.00 | RetiSTAR | Caprylic/capric triglyceride, sodium |
| | | | ascorbate, tocopherol, retinol |

(17)

| | | | |
|---|---|---|---|
| A | 7.50 | Uvinul MC 80 | Ethylhexyl methoxycinnamate |
| | 2.00 | Uvinul N 539 T | Octocrylene |
| | 3.00 | Emulgade PL 68/50 | Cetearyl glucoside, cetearyl alcohol |
| | 2.00 | Dracorin 100 SE | Glyceryl stearate, PEG-100 stearate |
| | 1.00 | Fitoderm | Squalane |
| | 0.50 | Cremophor WO 7 | PEG-7-hydrogenated castor oil |
| | 0.50 | Cremophor PS 20 | Polysorbate 20 |
| | 2.00 | Dry Flo Pure | Aluminum starch octenyl succinate |
| B | 5.00 | T-Lite SF-S | Titanium dioxide, silicon hydrate, |
| | | | aluminum hydrate, methicone/ |
| | | | dimethicone copolymer |
| C | 4.00 | 1,2-Propylene | Propylene glycol |
| | | glycol Care | |
| | 0.20 | Keltrol | Xanthan gum |
| | 0.50 | Simulgel 600 | Acrylamide/sodium |
| | | | acryloyldimethyltaurate copolymer, |
| | | | isohexadecane, polysorbate 80 |
| | ad 100 | Water dem. | Aqua dem. |
| | q.s. | Preservative | |
| | 0.50 | Vitamin E acetate | Tocopheryl acetate |
| | 1% | P18 | |
| | 2.00 | RetiSTAR | Caprylic/capric triglyceride, sodium |
| | | | ascorbate, tocopherol, retinol |

(18)

| | | | |
|---|---|---|---|
| A | 7.50 | Uvinul MC 80 | Ethylhexyl methoxycinnamate |
| | 5.00 | Uvinul N 539 T | Octocrylene |
| | 3.00 | Emulgade PL 68/50 | Cetearyl glucoside, cetearyl alcohol |
| | 2.00 | Dracorin 100 SE | Glyceryl stearate, PEG-100 stearate |
| | 1.00 | Fitoderm | Squalane |
| | 0.50 | Cremophor WO 7 | PEG-7-hydrogenated castor oil |
| | 0.50 | Cremophor PS 20 | Polysorbate 20 |
| | 2.00 | Dry Flo Pure | Aluminum starch octenyl succinate |
| B | 5.00 | T-Lite SF | Titanium dioxide, aluminum hydrate, |
| | | | dimethicone/methicone copolymer |
| C | 4.00 | 1,2-Propylene | Propylene glycol |
| | | glycol Care | |
| | 1.00 | D-Panthenol 50 P | Panthenol, propylene glycol |
| | 0.20 | Keltrol | Xanthan gum |
| | 0.50 | Simulgel 600 | Acrylamide/sodium |
| | | | acryloyldimethyltaurate copolymer, |
| | | | isohexadecane, polysorbate 80 |
| | ad 100 | Water dem. | Aqua dem. |
| | q.s. | Preservative | |
| | 0.50 | Vitamin E acetate | Tocopheryl acetate |
| | 1% | P18 | |
| | 1.00 | RetiSTAR | Caprylic/capric triglyceride, sodium |
| | | | ascorbate, tocopherol, retinol |

(19)

| | | | |
|---|---|---|---|
| A | 5.50 | Uvinul MC 80 | Ethylhexyl methoxycinnamate |
| | 2.00 | Uvinul A Plus | Diethylaminohydroxybenzoylhexyl |
| | | | benzoate |
| | 3.00 | Uvinul N 539 T | Octocrylene |
| | 3.00 | Emulgade PL 68/50 | Cetearyl glucoside, cetearyl alcohol |
| | 2.00 | Dracorin 100 SE | Glyceryl stearate, PEG-100 stearate |
| | 1.00 | Fitoderm | Squalane |
| | 0.50 | Cremophor WO 7 | PEG-7-hydrogenated castor oil |
| | 0.50 | Cremophor PS 20 | Polysorbate 20 |
| | 2.00 | Dry Flo Pure | Aluminum starch octenyl succinate |
| B | 5.00 | T-Lite SF | Titanium dioxide, aluminum hydrate, |
| | | | dimethicone/methicone copolymer |
| C | 4.00 | 1,2-Propylene | Propylene glycol |
| | | glycol Care | |
| | 0.20 | Keltrol | Xanthan gum |
| | 0.50 | Simulgel 600 | Acrylamide/sodium |
| | | | acryloyldimethyltaurate copolymer, |
| | | | isohexadecane, polysorbate 80 |
| | ad 100 | Water dem. | Aqua dem. |
| | q.s. | Preservative | |
| | 0.50 | Vitamin E acetate | Tocopheryl acetate |
| | 2% | P18 | |
| | 1.00 | RetiSTAR | Caprylic/capric triglyceride, sodium |
| | | | ascorbate, tocopherol, retinol |

(20)

| | | | |
|---|---|---|---|
| A | 1.00 | Abil Care 85 | Bis-PEG-/PPG-16-/16 PEG-/ |
| | | | PPG-16-/16-dimethicone, |
| | | | caprylic/capric triglyceride |
| | 3.00 | Cremophor CO 40 | PEG-40-hydrogenated castor oil |
| | 0.30 | Cremophor WO 7 | PEG-7-hydrogenated castor oil |
| | 2.00 | Parsol 1789 | Butylmethoxydibenzoylmethane |
| | 2.00 | Mexoryl XL | Drometrizoletrisiloxane |
| | 10.00 | Witconol APM | PPG-3 myristyl ether |
| | 1.00 | Uvinul T 150 | Ethylhexyltriazone |
| | 1.00 | Dow Corning 345 Fluid | Cyclopentasiloxane, |
| | | | cyclohexasiloxane |
| | 5.00 | Uvinul N 539 T | Octocrylene |
| B | 3.00 | Z-COTE MAX | Zinc oxide (and) |
| | | | diphenylcaprylmethicone |
| C | 5.00 | 1,2-Propylene glycol | Propylene glycol |
| | 1.00 | Mexoryl SX | Terephthalidenedicamphorsulfonic |
| | | | acid |
| | 0.20 | Keltrol | Xanthan gum |
| | 0.06 | Edeta BD | Disodium EDTA |
| | 0.04 | TEA | Triethanolamine |
| | 0.30 | Carbopol Ultrez 10P | Carbomer |
| | 63.50 | Water dem. | Aqua dem. |
| | 1% | P18 | |
| D | q.s. | Perfume oil | |
| | 0.50 | Glydant | DMDM hydantoin |

(21)

| | | | |
|---|---|---|---|
| A | 5.50 | Uvinul MC 80 | Ethylhexyl methoxycinnamate |
| | 2.00 | Uvinul A Plus | Diethylaminohydroxybenzoylhexyl |
| | | | benzoate |
| | 3.00 | Uvinul N 539 T | Octocrylene |
| | 3.00 | Emulgade PL 68/50 | Cetearyl glucoside, cetearyl alcohol |
| | 2.00 | Dracorin 100 SE | Glyceryl stearate, PEG-100 stearate |
| | 1.00 | Fitoderm | Squalane |
| | 0.50 | Cremophor WO 7 | PEG-7-hydrogenated castor oil |
| | 0.50 | Cremophor PS 20 | Polysorbate 20 |
| | 2.00 | Dry Flo Pure | Aluminum starch octenyl succinate |
| B | 5.00 | T-Lite SF-S | Titanium dioxide, silicon hydrate, |
| | | | aluminum hydrate, methicone/ |
| | | | dimethicone copolymer |
| C | 4.00 | 1,2-Propylene | Propylene glycol |
| | | glycol Care | |
| | 0.20 | Keltrol | Xanthan gum |
| | 2.00 | Simulgel NS | Hydroxyethyl acrylate/sodium |
| | | | acryloyldimethyltaurate copolymer, |
| | | | squalane, polysorbate 60 |
| | 66.30 | Water dem. | Aqua dem. |
| | q.s. | Preservative | |
| | 0.50 | Vitamin E acetate | Tocopheryl acetate |
| | 0.5% | P18 | |
| | 1.00 | RetiSTAR | Caprylic/capric triglyceride, sodium |
| | | | ascorbate, tocopherol, retinol |

(22)

| | | | |
|---|---|---|---|
| A | 2.00 | Cremophor A 6 | Ceteareth-6, stearyl alcohol |
| | 2.00 | Cremophor A 25 | Ceteareth-25 |
| | 3.00 | Syncrowax HRC | Tribehenin |
| | 2.00 | Lanette O | Cetearyl alcohol |
| | 2.00 | Luvitol EHO | Cetearyl ethylhexanoate |
| | 5.00 | Uvinul MC 80 | Ethylhexyl methoxycinnamate |
| | 1.00 | Ganex V-220 | VP/eicosene copolymer |
| | 7.00 | Isopropyl palmitate | Isopropyl palmitate |
| B | 3.00 | Z-COTE MAX | Zinc oxide (and) |
| | | | diphenylcaprylmethicone |
| C | 0.20 | Keltrol | Xanthan gum |
| | 0.50 | Simulgel NS | Hydroxyethyl acrylate/sodium |
| | | | acryloyldimethyltaurate |
| | | | copolymer, squalane, |
| | | | polysorbate 60 |
| | 65.10 | Water dem. | Aqua dem. |
| | 0.20 | Edeta BD | Disodium EDTA |
| | 5.00 | 1,2-Propylene glycol Care | Propylene glycol |
| | 0.5% | P18 | |
| D | 1.00 | Vitamin E acetate | Tocopheryl acetate |
| | q.s. | Preservative | |

(23)

| | | | |
|---|---|---|---|
| A | 2.00 | Cremophor A 6 | Ceteareth-6, stearyl alcohol |
| | 2.00 | Cremophor A 25 | Ceteareth-25 |
| | 3.00 | Syncrowax HRC | Tribehenin |
| | 2.00 | Lanette O | Cetearyl alcohol |
| | 2.00 | Luvitol EHO | Cetearyl ethylhexanoate |
| | 5.00 | Uvinul MC 80 | Ethylhexyl methoxycinnamate |
| | 1.00 | Ganex V-220 | VP/eicosene copolymer |
| | 7.00 | Isopropyl palmitate | Isopropyl palmitate |
| B | 3.00 | T-Lite SF | Titanium dioxide, aluminum hydrate, |
| | | | dimethicone/methicone copolymer |
| C | 0.50 | Keltrol | Xanthan gum |
| | 0.50 | Simulgel NS | Hydroxyethyl acrylate/sodium |
| | | | acryloyldimethyltaurate copolymer, |
| | | | squalane, polysorbate 60 |
| | 65.10 | Water dem. | Aqua dem. |
| | 0.20 | Edeta BD | Disodium EDTA |
| | 5.00 | 1,2-Propylene | Propylene glycol |
| | | glycol Care | |
| | 0.5% | P18 | |
| D | 1.00 | Vitamin E acetate | Tocopheryl acetate |
| | q.s. | Preservative | |

(24)

| | | | |
|---|---|---|---|
| A | 2.00 | Cremophor A 6 | Ceteareth-6, stearyl alcohol |
| | 2.00 | Cremophor A 25 | Ceteareth-25 |
| | 3.00 | Syncrowax HRC | Tribehenin |
| | 2.00 | Lanette O | Cetearyl alcohol |
| | 2.00 | Luvitol EHO | Cetearyl ethylhexanoate |
| | 5.00 | Uvinul MC 80 | Ethylhexyl methoxycinnamate |
| | 1.00 | Ganex V-220 | VP/eicosene copolymer |
| | 7.00 | Isopropyl palmitate | Isopropyl palmitate |
| B | 3.00 | T-Lite SF-S | Titanium dioxide, silicon hydrate, |
| | | | aluminum hydrate, |
| | | | methicone/dimethicone copolymer |
| C | 0.50 | Keltrol | Xanthan gum |
| | 0.50 | Simulgel NS | Hydroxyethyl acrylate/sodium |
| | | | acryloyldimethyltaurate copolymer, |
| | | | squalane, polysorbate 60 |
| | 64.60 | Water dem. | Aqua dem. |
| | 0.20 | Edeta BD | Disodium EDTA |
| | 5.00 | 1,2-Propylene glycol | Propylene glycol |
| | | Care | |
| | 1% | P18 | |
| D | 1.00 | Vitamin E acetate | Tocopheryl acetate |
| | q.s. | Preservative | |

(25)

| | | | |
|---|---|---|---|
| A | 2.00 | Cremophor A 6 | Ceteareth-6, stearyl alcohol |
| | 2.00 | Cremophor A 25 | Ceteareth-25 |
| | 3.00 | Syncrowax HRC | Tribehenin |
| | 2.00 | Lanette O | Cetearyl alcohol |
| | 2.00 | Luvitol EHO | Cetearyl ethylhexanoate |
| | 5.00 | Uvinul MC 80 | Ethylhexyl methoxycinnamate |
| | 1.00 | Ganex V-220 | VP/eicosene copolymer |
| | 7.00 | Isopropyl palmitate | Isopropyl palmitate |
| B | 3.00 | T-Lite SF-S | Titanium dioxide, silicon hydrate, |
| | | | aluminum hydrate, |
| | | | methicone/dimethicone copolymer |
| C | 0.50 | Keltrol | Xanthan gum |
| | 0.50 | Simulgel NS | Hydroxyethyl acrylate/sodium |
| | | | acryloyldimethyltaurate copolymer, |
| | | | squalane, polysorbate 60 |
| | 64.10 | Water dem. | Aqua dem. |
| | 2.00 | Neoheliopan AP | Disodium |
| | | | phenyldibenzimidazoletetrasulfonate |
| | 0.20 | Edeta BD | Disodium EDTA |
| | 5.00 | 1,2-Propylene glycol | Propylene glycol |
| | | Care | |
| D | 1.00 | Vitamin E acetate | Tocopheryl acetate |
| | 1% | P18 | |
| | q.s. | Preservative | |

(26)

| | | | |
|---|---|---|---|
| A | 2.00 | Cremophor A 6 | Ceteareth-6, stearyl alcohol |
| | 2.00 | Cremophor A 25 | Ceteareth-25 |
| | 3.00 | Syncrowax HRC | Tribehenin |
| | 2.00 | Lanette O | Cetearyl alcohol |
| | 2.00 | Luvitol EHO | Cetearyl ethylhexanoate |
| | 7.00 | Uvinul N 539 T | Octocrylene |
| | 1.00 | Ganex V-220 | VP/eicosene copolymer |
| | 7.00 | Isopropyl palmitate | Isopropyl palmitate |
| B | 3.00 | T-Lite SF-S | Titanium dioxide, silicon hydrate, |
| | | | aluminum hydrate, |
| | | | methicone/dimethicone copolymer |
| C | 0.50 | Keltrol | Xanthan gum |
| | 0.50 | Simulgel NS | Hydroxyethyl acrylate/sodium |
| | | | acryloyldimethyltaurate copolymer, |
| | | | squalane, polysorbate 60 |
| | 64.60 | Water dem. | Aqua dem. |
| | 1.00 | Mexoryl SX | Terephthalidenedicamphorsulfonic acid |
| | 0.20 | Edeta BD | Disodium EDTA |
| | 5.00 | 1,2-Propylene glycol Care | Propylene glycol |
| D | 1.00 | Vitamin E acetate | Tocopheryl acetate |
| | 1% | P18 | |
| | q.s. | Preservative | |

(27)

| | | | |
|---|---|---|---|
| A | 2.00 | Cremophor A 6 | Ceteareth-6, stearyl alcohol |
| | 2.00 | Cremophor A 25 | Ceteareth-25 |
| | 3.00 | Syncrowax HRC | Tribehenin |
| | 2.00 | Lanette O | Cetearyl alcohol |
| | 2.00 | Luvitol EHO | Cetearyl ethylhexanoate |
| | 2.00 | Mexoryl XL | Drometrizole trisiloxane |
| | 5.00 | Uvinul N 539 T | Octocrylene |
| | 1.00 | Ganex V-220 | VP/eicosene copolymer |
| | 7.00 | Isopropyl palmitate | Isopropyl palmitate |
| B | 3.00 | T-Lite SF | Titanium dioxide, aluminum hydrate, |
| | | | dimethicone/methicone copolymer |
| C | 0.50 | Keltrol | Xanthan gum |
| | 0.50 | Simulgel NS | Hydroxyethyl acrylate/sodium |
| | | | acryloyldimethyltaurate copolymer, |
| | | | squalane, polysorbate 60 |
| | 65.10 | Water dem. | Aqua dem. |
| | 0.20 | Edeta BD | Disodium EDTA |
| | 5.00 | 1,2-Propylene glycol Care | Propylene glycol |
| D | 1.00 | Vitamin E acetate | Tocopheryl acetate |
| | 0.5% | P18 | |
| | q.s. | Preservative | |

(28)

| | | | |
|---|---|---|---|
| | 1.00 | Urea | Urea |
| | 2.00 | Neoheliopan AP | Disodium |
| | | | phenyldibenzimidazoletetrasulfonate |
| | 2.00 | Glycerol 87% | Glycerol |
| | 1.20 | Aristoflex AVC | Ammonium acryloyldimethyltaurate/ |
| | | | VP copolymer |
| | 71.30 | Water dem. | Aqua dem. |
| B | 3.00 | Cremophor CO 40 | PEG-40-hydrogenated castor oil |
| | q.s. | Perfume oil | |
| | 5.00 | Miglyol 812 | Caprylic/capric triglyceride |
| | 2.00 | Uvinul N 539 T | Octocrylene |
| | 8.00 | Z-COTE MAX | Zinc oxide (and) |
| | | | diphenylcaprylmethicone |
| | 0.1% | P18 | |
| | q.s. | Preservative | |

(29)

| | | |
|---|---|---|
| 5.00 | Z-COTE MAX | Zinc oxide (and) |
| | | diphenylcaprylmethicone |
| 2.00 | Parsol 1789 | Butylmethoxydibenzoylmethane |
| 1.00 | Uvinul T150 | Ethylhexyltriazone |
| 5.00 | Uvinul MC 80 | Ethylhexyl methoxycinnamate |
| 2.00 | Uvinul T 539 N | Octocrylene |
| 0.50 | Abil 350 | Dimethicone |
| 2.75 | Carnico wax LT 20 | Carnauba (Copernica cerifera) wax, |
| | | paraffins |
| 3.70 | Candelilla wax LT 281 LJ | Candelilla (Euphorbia cerifera) wax |
| 1.80 | Beeswax 3050 PH | Beeswax |
| 3.20 | TeCero-wax 30445 | Microcrystalline wax |
| 3.20 | TeCero-wax 1030 K | Microcrystalline wax |
| 1.34 | Cutina CP | Cetyl palmitate |
| 6.40 | Vaseline | Petrolatum |
| 7.30 | Softisan 100 | Hydrogenated cocoglycerides |
| 10.00 | Luvitol EHO | Cetearyl ethylhexanoate |
| 0.17 | Bisabolol nat. | Bisabolol |
| 1.84 | Vitamin E acetate | Tocopheryl acetate |
| 0.42 | D,L-Alpha-Tocopherol | Tocopherol |
| 1% | P18 | |
| 40.38 | Castor oil | Castor (Ricinus communis) oil |

(30)

| | | |
|---|---|---|
| 5.00 | T-Lite SF | Titanium dioxide, aluminum hydrate, |
| | | dimethicone/methicone copolymer |
| 2.00 | Parsol 1789 | Butylmethoxydibenzoylmethane |
| 1.00 | Uvinul T150 | Ethylhexyltriazone |
| 3.00 | Uvinul MC 80 | Ethylhexyl methoxycinnamate |
| 2.00 | Uvinul N 539 T | Octocrylene |
| 0.50 | Abil 350 | Dimethicone |
| 2.75 | Carnico wax LT 20 | Carnauba (Copernica cerifera) wax, |
| | | paraffin |
| 3.70 | Candelilla wax LT 281 LJ | Candelilla (Euphorbia cerifera) wax |
| 1.80 | Beeswax 3050 PH | Beeswax |
| 3.20 | TeCero-wax 30445 | Microcrystalline wax |
| 3.20 | TeCero-wax 1030 K | Microcrystalline wax |
| 1.34 | Cutina CP | Cetyl palmitate |
| 6.40 | Vaseline | Petrolatum |
| 7.30 | Softisan 100 | Hydrogenated cocoglycerides |
| 10.00 | Luvitol EHO | Cetearyl ethylhexanoate |
| 0.17 | Bisabolol nat. | Bisabolol |
| 1.84 | Vitamin E acetate | Tocopheryl acetate |
| 0.42 | D,L-Alpha-Tocopherol | Tocopherol |
| 1% | P18 | |
| 40.38 | Castor oil | Castor (Ricinus communis) oil |

(31)

| | | |
|---|---|---|
| 5.00 | T-Lite SF-S | Titanium dioxide, silicon hydrate, |
| | | aluminum hydrate, |
| | | methicone/dimethicone copolymer |
| 2.00 | Uvinul A Plus | Diethylaminohydroxybenzoylhexyl |
| | | benzoate |
| 2.00 | Mexoryl XL | Drometrizole trisiloxane |
| 3.00 | Uvinul MC 80 | Ethylhexyl methoxycinnamate |
| 0.50 | Abil 350 | Dimethicone |
| 2.75 | Carnico wax LT 20 | Carnauba (Copernica cerifera) wax, |
| | | paraffins |
| 3.70 | Candelilla wax LT 281 LJ | Candelilla (Euphorbia cerifera) wax |
| 1.80 | Beeswax 3050 PH | Beeswax |
| 3.20 | TeCero-wax 30445 | Microcrystalline wax |
| 3.20 | TeCero-wax 1030 K | Microcrystalline wax |
| 1.34 | Cutina CP | Cetyl palmitate |
| 6.40 | Vaseline | Petrolatum |
| 7.30 | Softisan 100 | Hydrogenated cocoglycerides |
| 10.00 | Luvitol EHO | Cetearyl ethylhexanoate |
| 0.17 | Bisabolol nat. | Bisabolol |
| 1.84 | Vitamin E acetate | Tocopheryl acetate |
| 0.42 | D,L-Alpha-Tocopherol | Tocopherol |
| 2% | P18 | |
| 39.38 | Castor oil | Castor (Ricinus communis) oil |

(32)

| | | | |
|---|---|---|---|
| A | 6.00 | Cremophor WO 7 | PEG-7-hydrogenated castor oil |
| | 2.00 | Elfacos ST 9 | PEG-45-/dodecyl glycol copolymer |
| | 3.00 | Isopropyl myristate | Isopropylmyristate |
| | 8.00 | Jojoba oil | Simmondsia chinensis (jojoba) seed oil |
| | 4.00 | Uvinul MC 80 | Ethylhexyl methoxycinnamate |
| | 2.00 | Uvinul A Plus | Diethylaminohydroxybenzoylhexyl |
| | | | benzoate |
| | 1.00 | Abil 350 | Dimethicone |
| B | 5.00 | Z-COTE MAX | Zinc oxide (and) |
| | | | diphenylcaprylmethicone |
| | 3.00 | T-Lite SF | Titanium dioxide, aluminum hydrate, |
| | | | dimethicone/methicone copolymer |
| C | 0.20 | Edeta BD | Disodium EDTA |
| | 5.00 | Glycerol 87% | Glycerol |
| | 0.30 | Chemag 2000 | Imidazolidinylurea |
| | 59.00 | Water dem. | Aqua dem. |
| D | q.s. | Perfume oil | |
| | 1% | P18 | |
| | q.s. | Preservative | |

(33)

| | | | |
|---|---|---|---|
| | 2.00 | Cremophor A 6 | Ceteareth-6, stearyl alcohol |
| | 2.00 | Cremophor A 25 | Ceteareth-25 |
| | 3.00 | Syncrowax HRC | Tribehenin |
| | 2.00 | Lanette O | Cetearyl alcohol |
| | 2.00 | Luvitol EHO | Cetearyl ethylhexanoate |
| | 5.00 | Uvinul MC 80 | Ethylhexyl methoxycinnamate |
| | 1.00 | Uvinul T 150 | Ethylhexyltriazone |
| | 1.00 | Ganex V-220 | VP/eicosene copolymer |
| | 7.00 | Isopropyl myristate | Isopropyl myristate |
| B | 5.00 | Z-COTE MAX | Zinc oxide (and) |
| | | | diphenylcaprylmethicone |
| C | 0.20 | Keltrol | Xanthan gum |
| | 0.50 | Simulgel NS | Hydroxyethyl acrylate/sodium |
| | | | acryloyldimethyltaurate |
| | | | copolymer, squalane, |
| | | | polysorbate 60 |
| | 61.10 | Water dem. | Aqua dem. |
| | 0.20 | Edeta BD | Disodium EDTA |
| | 5.00 | 1,2-Propylene glycol Care | Propylene glycol |
| D | 1.00 | Vitamin E acetate | Tocopheryl acetate |
| | 1.5% | P18 | |
| | q.s. | Preservative | |

(34)

| | | | |
|---|---|---|---|
| A | 2.00 | Luvitol EHO | Cetearyl ethylhexanoate |
| | 5.00 | Paraffin oil | Mineral oil |
| | 5.00 | Z-COTE MAX | Zinc oxide (and) |
| | | | diphenylcaprylmethicone |
| B | 1.00 | Cremophor A 6 | Ceteareth-6, stearyl alcohol |
| | 2.00 | Cremophor A 25 | Ceteareth-25 |
| | 3.00 | Glycerol monostearate | Glyceryl stearate |
| | 4.00 | Cetylstearyl alcohol | Cetearyl alcohol |
| C | 5.00 | 1,2-Propylene glycol Care | Propylene glycol |
| | 7.50 | Luviquat Care | Polyquaternium-44 |
| | q.s. | Preservative | |
| | q.s. | Perfume oil | |
| | 1% | P18 | |
| | 64.50 | Water dem. | Aqua dem. |

(35)

| | | |
|---|---|---|
| 5.00 | T-Lite SF | Titanium dioxide, aluminum |
| | | hydrate, dimethicone/methicone |
| | | copolymer |
| 10.00 | Z-COTE MAX | Zinc oxide (and) |
| | | diphenylcaprylmethicone |
| 12.00 | Beeswax 3044 PH | Beeswax |
| 8.00 | Candelilla wax LT 281 LJ | Candelilla (Euphorbia cerifera) |
| | | wax |
| 5.00 | Tegin | Glyceryl stearate SE |
| 5.00 | Dow Corning 345 Fluid | Cyclopentasiloxane, |
| | | cyclohexasiloxane |
| 5.00 | Witconol APM | PPG-3 myristyl ether |
| 5.00 | Softisan 154 | Hydrogenated palm oil |
| 8.00 | Paraffin oil, thick-liquid | Mineral oil |
| 3.00 | Vaseline | Petrolatum |
| 2% | P18 | |
| 32.00 | Castor oil | Castor (Ricinus communis) oil |

(36)

| | | |
|---|---|---|
| 3.00 | Uvinul MC 80 | Ethylhexyl methoxycinnamate |
| 2.00 | Uvinul T 150 | Ethylhexyltriazone |
| 2.00 | Uvinul A Plus | Diethylaminohydroxybenzoylhexyl |
| | | benzoate |
| 10.00 | Z-COTE MAX | Zinc oxide (and) |
| | | diphenylcaprylmethicone |
| 12.00 | Beeswax 3044 PH | Beeswax |
| 3.00 | Vaseline | Petrolatum |
| 8.00 | Candelilla wax LT 281 LJ | Candelilla (Euphorbia cerifera) |
| | | wax |
| 8.00 | Paraffin oil, thick-liquid | Mineral oil |
| 5.00 | Tegin | Glyceryl stearate SE |
| 5.00 | Softisan 154 | Hydrogenated palm oil |
| 5.00 | Witconol APM | PPG-3 myristyl ether |
| 5.00 | Dow Corning 345 Fluid | Cyclopentasiloxane, |
| | | cyclohexasiloxane |
| 0.1% | P18 | |
| 28.90 | Castor oil | Castor (Ricinus communis) oil |

(37)

| | | | |
|---|---|---|---|
| | 5.00 | T-Lite SF | Titanium dioxide, aluminum hydrate, |
| | | | dimethicone/methicone copolymer |
| | 6.00 | Finsolv TN | C₁₂₋₁₅-Alkyl benzoate |
| | 10.00 | Uvinul MC 80 | Ethylhexyl methoxycinnamate |
| | 6.00 | Miglyol 812 | Caprylic/capric triglyceride |
| | 5.00 | Arlacel P 135 | PEG-30 dipolyhydroxystearate |
| | 2.00 | Ganex V 216 | PVP/hexadecene copolymer |
| | 2.00 | Elfacos ST 9 | PEG-45/dodecyl glycol copolymer |
| B | 3.00 | 1,2-Propylene glycol Care | Propylene glycol |
| | 0.10 | Edeta BD | Disodium EDTA |
| | 1.00 | Magnesium sulfate 7-hydrate | Magnesium sulfate |
| | 59.40 | Water dem. | Aqua dem. |
| | 0.5% | P18 | |
| | q.s. | Preservative | |

(38)

| | | | |
|---|---|---|---|
| A | 4.00 | Dehymuls SBL | Polyglyceryl-2 dipolyhydroxystearate, |
| | | | dicaprylyl ether, cocoglycerides, |
| | | | sorbitan sesquioleate, Cera alba, |
| | | | aluminum stearate, |
| | | | dicocoylpentaerythrityldistearyl citrate |
| | 1.00 | Dehymuls PGPH | Polyglyceryl-2 dipolyhydroxystearate |
| | 8.00 | Finsolv TN | C₁₂₋₁₅-Alkyl benzoate |
| | 4.00 | Miglyol 812 | Caprylic/capric triglyceride |
| | 4.00 | Uvinul MC 80 | Ethylhexyl methoxycinnamate |
| | 2.00 | Uvinul N 539 T | Octocrylene |
| B | 5.00 | Z-COTE MAX | Zinc oxide (and) |
| | | | diphenylcaprylmethicone |
| C | 3.00 | 1,2-Propylene glycol Care | Propylene glycol |
| | 0.30 | Abiol | Imidazolidinylurea |
| | 1.00 | Magnesium sulfate 7-hydrate | Magnesium sulfate |
| | ad 100 | Water dem. | Aqua dem. |
| | 1.5% | P18 | |
| D | q.s. | Preservative | |

(39)

| | | | |
|---|---|---|---|
| A | 4.00 | Dehymuls SBL | Polyglyceryl-2 dipolyhydroxystearate, |
| | | | dicaprylyl ether, cocoglycerides, |
| | | | sorbitan sesquioleate, Cera alba, |
| | | | aluminum stearate, |
| | | | dicocoylpentaerythrityldistearyl citrate |
| | 1.00 | Dehymuls PGPH | Polyglyceryl-2 dipolyhydroxystearate |
| | 8.00 | Finsolv TN | C₁₂₋₁₅-Alkyl benzoate |
| | 4.00 | Miglyol 812 | Caprylic/capric triglyceride |
| | 4.00 | Uvinul MC 80 | Ethylhexyl methoxycinnamate |
| | 2.00 | Uvinul N 539 T | Octocrylene |
| B | 5.00 | T-Lite SF-S | Titanium dioxide, silicon hydrate, |
| | | | aluminum hydrate, |
| | | | methicone/dimethicone copolymer |
| C | 3.00 | 1,2-Propylene glycol Care | Propylene glycol |
| | 0.30 | Abiol | Imidazolidinylurea |
| | 1.00 | Magnesium sulfate 7-hydrate | Magnesium sulfate |
| | 1.0% | P18 | |
| | ad 100 | Water dem. | Aqua dem. |
| D | q.s. | Preservative | |

(40)

| | | | |
|---|---|---|---|
| A | 4.00 | Dehymuls SBL | Polyglyceryl-2 dipolyhydroxystearate, |
| | | | dicaprylyl ether, cocoglycerides, |
| | | | sorbitan sesquioleate, Cera alba, |
| | | | aluminum stearate, |
| | | | dicocoylpentaerythrityldistearyl citrate |
| | 1.00 | Dehymuls PGPH | Polyglyceryl-2 dipolyhydroxystearate |
| | 8.00 | Finsolv TN | C₁₂₋₁₅-Alkyl benzoate |
| | 4.00 | Miglyol 812 | Caprylic/capric triglyceride |
| | 8.00 | Uvinul A Plus B | Ethylhexyl methoxycinnamate and |
| | | | diethylaminohydroxybenzoylhexyl |
| | | | benzoate |
| | 2.00 | Uvinul N 539 T | Octocrylene |
| B | 5.00 | Z-COTE MAX | Zinc oxide (and) |
| | | | diphenylcaprylmethicone |
| C | 3.00 | 1,2-Propylene glycol Care | Propylene glycol |
| | 0.30 | Abiol | Imidazolidinylurea |
| | 1.00 | Magnesium sulfate 7-hydrate | Magnesium sulfate |
| | 0.1% | P18 | |
| | ad 100 | Water dem. | Aqua dem. |
| | q.s. | Preservative | |

(41)

| | | | |
|---|---|---|---|
| A | 4.00 | Dehymuls SBL | Polyglyceryl-2 dipolyhydroxystearate, |
| | | | dicaprylyl ether, cocoglycerides, |
| | | | sorbitan sesquioleate, Cera alba, |
| | | | aluminum stearate, |
| | | | dicocoylpentaerythrityldistearyl citrate |
| | 1.00 | Dehymuls PGPH | Polyglyceryl-2 dipolyhydroxystearate |
| | 8.00 | Finsolv TN | C₁₂₋₁₅-Alkyl benzoate |
| | 4.00 | Miglyol 812 | Caprylic/capric triglyceride |
| | 8.00 | Uvinul A Plus B | Ethylhexyl methoxycinnamate and |
| | | | diethylaminohydroxybenzoylhexyl |
| | | | benzoate |
| | 2.00 | Uvinul N 539 T | Octocrylene |
| B | 5.00 | T-Lite SF | Titanium dioxide, aluminum hydrate, |
| | | | dimethicone/methicone copolymer |
| C | 3.00 | 1,2-Propylene glycol Care | Propylene glycol |
| | 0.30 | Abiol | Imidazolidinylurea |
| | 1.00 | Magnesium sulfate 7-hydrate | Magnesium sulfate |
| | ad 100 | Water dem. | Aqua dem. |
| | 0.2% | P18 | |
| | q.s. | Preservative | |

(42)

| | | | |
|---|---|---|---|
| A | 4.00 | Dehymuls SBL | Polyglyceryl-2 dipolyhydroxystearate, |
| | | | dicaprylyl ether, cocoglycerides, |
| | | | sorbitan sesquioleate, Cera alba, |
| | | | aluminum stearate, |
| | | | dicocoylpentaerythrityldistearyl citrate |
| | 1.00 | Dehymuls PGPH | Polyglyceryl-2 dipolyhydroxystearate |
| | 8.00 | Finsolv TN | C₁₂₋₁₅-Alkyl benzoate |
| | 4.00 | Miglyol 812 | Caprylic/capric triglyceride |
| | 8.00 | Uvinul A Plus B | Ethylhexyl methoxycinnamate and |
| | | | diethylaminohydroxybenzoylhexyl |
| | | | benzoate |
| | 2.00 | Uvinul N 539 T | Octocrylene |
| B | 5.00 | T-Lite SF-S | Titanium dioxide, silicon hydrate, |
| | | | aluminum hydrate, |
| | | | methicone/dimethicone copolymer |
| C | 3.00 | 1,2-Propylene glycol Care | Propylene glycol |
| | 0.30 | Abiol | Imidazolidinylurea |
| | 1.00 | Magnesium sulfate 7-hydrate | Magnesium sulfate |
| | 0.5% | P18 | |
| | ad 100 | Water dem. | Aqua dem. |
| | q.s. | Preservative | |

(43)

| | | | |
|---|---|---|---|
| A | 4.00 | Dehymuls SBL | Polyglyceryl-2 dipolyhydroxystearate, |
| | | | dicaprylyl ether, cocoglycerides, |
| | | | sorbitan sesquioleate, Cera alba, |
| | | | aluminum stearate, |
| | | | dicocoylpentaerythrityldistearyl citrate |
| | 1.00 | Dehymuls PGPH | Polyglyceryl-2 dipolyhydroxystearate |
| | 8.00 | Finsolv TN | C₁₂₋₁₅-Alkyl benzoate |
| | 4.00 | Miglyol 812 | Caprylic/capric triglyceride |
| | 7.00 | Uvinul MC 80 | Ethylhexyl methoxycinnamate |
| | 2.00 | Mexoryl XL | Drometrizole trisiloxane |
| B | 5.00 | Z-COTE MAX | Titanium dioxide, aluminum hydrate, |
| | | | dimethicone/methicone copolymer |
| C | 3.00 | 1,2-Propylene glycol Care | Propylene glycol |
| | 0.30 | Abiol | Imidazolidinylurea |
| | 1.00 | Magnesium sulfate 7-hydrate | Magnesium sulfate |
| | ad 100 | Water dem. | Aqua dem. |
| | 0.01% | P18 | |
| | q.s. | Preservative | |

(44)

| | | | |
|---|---|---|---|
| A | 7.50 | Uvinul MC 80 | Ethylhexyl methoxycinnamate |
| | 3.00 | Uvinul N 539 T | Octocrylene |
| | 2.00 | Uvinul A Plus | Diethylaminohydroxybenzoylhexyl |
| | | | benzoate |
| | 1.00 | Cremophor CO 40 | PEG-40 hydrogenated castor oil |
| | 10.00 | Miglyol 812 | Caprylic/capric triglyceride |
| | 1.50 | Dow Corning 345 | Cyclopentasiloxane, |
| | | Fluid | cyclohexasiloxane |
| B | 3.50 | Luvigel EM | Caprylic/capric triglyceride, sodium |
| | | | acrylate copolymer |
| C | 46.00 | Water dem. | Aqua dem. |
| D | 5.00 | 1,2-Propylene | Propylene glycol |
| | | glycol Care | |
| | 0.50 | Cremophor A 25 | Ceteareth-25 |
| | 0.05% | P18 | |
| | 20.00 | Ethanol 96% | Alcohol |

(45)

| | | | |
|---|---|---|---|
| A | 1.00 | Uvinul A Plus | Diethylaminohydroxybenzoylhexyl |
| | | | benzoate |
| | 1.00 | Tinosorb S | Bisethylhexyloxyphenol |
| | | | methoxyphenyltriazine |
| | 3.00 | Uvinul MC 80 | Ethylhexyl methoxycinnamate |
| | 8.00 | Miglyol 812 | Caprylic/capric triglyceride |
| | 1.50 | Dow Corning 350 | Dimethicone |
| | | Fluid | |
| | 3.00 | Z-COTE MAX | Titanium dioxide, aluminum hydrate, |
| | | | dimethicone/methicone copolymer |
| | 3.00 | Finsolv TN | C₁₂₋₁₅-Alkyl benzoate |
| | 1.00 | Cremophor CO 40 | PEG-40 hydrogenated castor oil |
| B | 2.00 | Luvigel EM | Caprylic/capric triglyceride, |
| | | | sodium acrylate copolymer |
| C | 54.80 | Water dem. | Aqua dem. |
| D | 15.00 | Ethanol 96% | Alcohol |
| | 5.00 | 1,2-Propylene | Propylene glycol |
| | | glycol Care | |
| | 0.50 | Cremophor A 25 | Ceteareth-25 |
| | 1.0% | P18 | |
| | 1.00 | Vitamin E acetate | Tocopheryl acetate |
| | 0.20 | Bisabolol rac. | Bisabolol |

(46)

| | | | |
|---|---|---|---|
| A | 4.00 | Dehymuls SBL | Polyglyceryl-2 dipolyhydroxystearate, |
| | | | dicaprylyl ether, cocoglycerides, sorbitan |
| | | | sesquioleate, Cera alba, aluminum |
| | | | stearate, dicocoylpentaerythrityldistearyl |
| | | | citrate |
| | 1.00 | Dehymuls PGPH | Polyglyceryl-2 dipolyhydroxystearate |
| | 6.00 | Finsolv TN | C₁₂₋₁₅-Alkyl benzoate |
| | 6.00 | Miglyol 812 | Caprylic/capric triglyceride |
| | 5.00 | Uvinul MC 80 | Ethylhexyl methoxycinnamate |
| | 3.00 | Neoheliopan HMS | Homosalate |
| B | 5.00 | Z-COTE MAX | Zinc oxide (and) |
| | | | diphenylcaprylmethicone |
| C | 3.00 | 1,2-Propylene glycol Care | Propylene glycol |
| | 0.30 | Chemag 2000 | Imidazolidinylurea |
| | 1.00 | Magnesium sulfate 7-hydrate | Magnesium sulfate |
| | 65.10 | Water dem. | Aqua dem. |
| | 0.1% | P18 | |
| | q.s. | Preservative | |

(47)

| | | | |
|---|---|---|---|
| A | 4.00 | Tego Care 450 | Polyglyceryl-3 methylglucose distearate |
| | 4.50 | Uvinul MC 80 | Ethylhexyl methoxycinnamate |
| | 3.00 | Uvinul N 539 T | Octocrylene |
| | 2.00 | Uvinul T 150 | Ethylhexyltriazone |
| | 0.50 | Vitamin E acetate | Tocopheryl acetate |
| B | 5.00 | Isohexadecane | Isohexadecane |
| | 5.00 | Cosmacol EMI | Di-C₁₂₋₁₃-alkyl malate |
| | 3.50 | Cetiol SN | Cetearyl isononanoate |
| | 1.00 | Ganex V-220 | VP/eicosene copolymer |
| | 5.00 | T-Lite SF | Titanium dioxide, aluminum hydrate, |
| | | | dimethicone/methicone copolymer |
| C | 60.00 | Water dem. | Water |
| | 5.00 | Glycerol 87% | Glycerol |
| | 1.00 | Lanette E | Sodium cetearyl sulfate |
| | 0.30 | Keltrol | Xanthan gum |
| | 0.2% | P18 | |
| D | q.s. | Preservative | |

(48)

| | | | |
|---|---|---|---|
| A | 4.00 | Tego Care 450 | Polyglyceryl-3 methylglucose |
| | | | distearate |
| | 4.50 | Uvinul MC 80 | Ethylhexyl methoxycinnamate |
| | 3.00 | Uvinul N 539 T | Octocrylene |
| | 2.00 | Neoheliopan HMS | Homosalate |
| | 0.50 | Vitamin E acetate | Tocopheryl acetate |
| B | 5.00 | Isohexadecane | Isohexadecane |
| | 5.00 | Cosmacol EMI | Di-C₁₂₋₁₃-alkyl malate |
| | 3.50 | Cetiol SN | Cetearyl isononanoate |
| | 1.00 | Ganex V-220 | VP/eicosene copolymer |
| | 5.00 | T-Lite SF | Titanium dioxide, aluminum hydrate, |
| | | | dimethicone/methicone copolymer |
| C | 59.20 | Water dem. | Aqua dem. |
| | 5.00 | Glycerol 87% | Glycerol |
| | 1.00 | Lanette E | Sodium cetearyl sulfate |
| | 0.30 | Keltrol | Xanthan gum |
| | 1.0% | P18 | |
| D | q.s. | Preservative | |

(49)

| | | | |
|---|---|---|---|
| A | 4.00 | Tego Care 450 | Polyglyceryl-3 methylglucose |
| | | | distearate |
| | 4.50 | Uvinul MC 80 | Ethylhexyl methoxycinnamate |
| | 3.00 | Neoheliopan OS | Octisalate |
| | 2.00 | Neoheliopan HMS | Homosalate |
| | 0.50 | Vitamin E acetate | Tocopheryl acetate |
| B | 5.00 | Isohexadecane | Isohexadecane |
| | 5.00 | Cosmacol EMI | Di-C₁₂₋₁₃-alkyl malate |
| | 3.50 | Cetiol SN | Cetearyl isononanoate |
| | 1.00 | Ganex V-220 | VP/eicosene copolymer |
| | 5.00 | Z-COTE MAX | Zinc oxide (and) |
| | | | diphenylcaprylmethicone |
| C | 60.15 | Water dem. | Aqua dem |
| | 5.00 | Glycerol 87% | Glycerol |
| | 1.00 | Lanette E | Sodium cetearyl sulfate |
| | 0.30 | Keltrol | Xanthan gum |
| | 0.05% | P18 | |
| D | q.s. | Preservative | |

(50)

| | | | |
|---|---|---|---|
| A | 4.00 | Tego Care 450 | Polyglyceryl-3 methylglucose |
| | | | distearate |
| | 4.50 | Uvinul N 539 T | Octocrylene |
| | 3.00 | Neoheliopan OS | Octisalate |
| | 2.00 | Neoheliopan HMS | Homosalate |
| | 0.50 | Vitamin E acetate | Tocopheryl acetate |
| B | 5.00 | Isohexadecane | Isohexadecane |
| | 5.00 | Cosmacol EMI | Di-C₁₂₋₁₃-alkyl malate |
| | 3.50 | Cetiol SN | Cetearyl isononanoate |
| | 1.00 | Ganex V-220 | VP/eicosene copolymer |
| | 5.00 | Z-COTE MAX | Zinc oxide (and) |
| | | | diphenylcaprylmethicone |
| C | 60.19 | Water dem. | Aqua dem. |
| | 5.00 | Glycerol 87% | Glycerol |
| | 1.00 | Lanette E | Sodium cetearyl sulfate |
| | 0.30 | Keltrol | Xanthan gum |
| | 0.01% | P18 | |
| D | q.s. | Preservative | |

(51)

| | | | |
|---|---|---|---|
| A | 4.00 | Tego Care 450 | Polyglyceryl-3 methylglucose |
| | | | distearate |
| | 4.50 | Uvinul N 539 T | Octocrylene |
| | 3.00 | Neoheliopan OS | Octisalate |
| | 2.00 | Neoheliopan HMS | Homosalate |
| | 0.50 | Vitamin E acetate | Tocopheryl acetate |
| B | 5.00 | Isohexadecane | Isohexadecane |
| | 5.00 | Cosmacol EMI | Di-C₁₂₋₁₃-alkyl malate |
| | 3.50 | Cetiol SN | Cetearyl isononanoate |
| | 1.00 | Ganex V-220 | VP/eicosene copolymer |
| | 5.00 | T-Lite SF-S | Titanium dioxide, silicon hydrate, |
| | | | aluminum hydrate, |
| | | | methicone/dimethicone copolymer |
| C | 59.20 | Water dem. | Aqua dem. |
| | 5.00 | Glycerol 87% | Glycerol |
| | 1.00 | Lanette E | Sodium cetearyl sulfate |
| | 0.30 | Keltrol | Xanthan gum |
| | 1.0% | P18 | |
| D | q.s. | Preservative | |

(52)

| | | | |
|---|---|---|---|
| A | 8.00 | Cetiol B | Dibutyl adipate |
| | 8.00 | Finsolv TN | C₁₂₋₁₅-Alkyl benzoate |
| | 12.00 | Myritol 331 | Cocoglycerides |
| | 1.00 | Lanette E | Sodium cetearyl sulfate |
| | 4.00 | Eumulgin VL 75 | Lauryl glucoside, polyglyceryl-2 |
| | | | dipolyhydroxystearate, glycerol |
| | 2.00 | Lanette O | Cetearyl alcohol |
| | 3.00 | Tinosorb S | Bisethylhexyloxyphenol methoxy- |
| | | | phenyltriazine |
| | 1.00 | Vitamin E acetate | Tocopheryl acetate |
| B | 4.00 | Z-COTE MAX | Zinc oxide (and) diphenylcapryl- |
| | | | methicone |
| C | 3.00 | Glycerol 87% | Glycerol |
| | 0.05 | Edeta BD | Disodium EDTA |
| | 0.20 | Allantoin | Allantoin |
| | 0.30 | Keltrol | Xanthan gum |
| | 1.50 | Veegum Ultra | Magnesium aluminum silicate |
| | 49.45 | Water dem. | Aqua dem. |
| | 1.0% | P18 | |
| D | q.s. | Preservative | |

(53)

| | | | |
|---|---|---|---|
| A | 8.00 | Cetiol B | Dibutyl adipate |
| | 8.00 | Finsolv TN | C₁₂₋₁₅-Alkyl benzoate |
| | 12.00 | Myritol 331 | Cocoglycerides |
| | 1.00 | Lanette E | Sodium cetearyl sulfate |
| | 4.00 | Eumulgin VL 75 | Laurylglucosid, polyglyceryl-2 |
| | | | dipolyhydroxystearate, glycerol |
| | 2.00 | Lanette O | Cetearyl alcohol |
| | 3.00 | Tinosorb S | Bisethylhexyloxyphenol |
| | | | methoxyphenyltriazine |
| | 1.00 | Vitamin E acetate | Tocopheryl acetate |
| B | 4.00 | T-Lite SF | Titanium dioxide, aluminum hydrate, |
| | | | dimethicone/methicone copolymer |
| C | 3.00 | Glycerol 87% | Glycerol |
| | 0.05 | Edeta BD | Disodium EDTA |
| | 0.20 | Allantoin | Allantoin |
| | 0.30 | Keltrol | Xanthan gum |
| | 1.50 | Veegum Ultra | Magnesium aluminum silicate |
| | 50.25 | Water dem. | Aqua dem. |
| D | 0.50 | Citric acid | Citric acid |
| | q.s. | Perfume oil | |
| | 0.2% | P18 | |
| | q.s. | Preservative | |

(54)

| | | | |
|---|---|---|---|
| A | 5.00 | Cosmacol EMI | Di-C₁₂₋₁₃-alkyl malate |
| | 4.50 | Uvinul MC 80 | Ethylhexyl methoxycinnamate |
| | 3.00 | Uvinul N 539 T | Octocrylene |
| | 2.00 | Uvinul T 150 | Ethylhexyltriazone |
| B | 4.00 | Tego Care 450 | Polyglyceryl-3 methylglucose |
| | | | distearate |
| | 5.00 | Isohexadecane | Isohexadecane |
| | 3.50 | Cetiol SN | Cetearyl isononanoate |
| | 0.50 | Vitamin E acetate | Tocopheryl acetate |
| | 1.00 | Ganex V-220 | VP/eicosene copolymer |
| | 2.50 | T-Lite SF | Titanium dioxide, aluminum hydrate, |
| | | | dimethicone/methicone copolymer |
| C | 5.00 | Glycerol 87% | Glycerol |
| | 2.00 | Lanette E | Sodium cetearyl sulfate |
| | 0.30 | Keltrol | Xanthan gum |
| | 1.00 | Pationic 138 C | Sodium lauroyl lactylate |
| | 1.00 | Pationic SSL | Sodium stearoyl lactylate |
| | 42.00 | Water dem. | Aqua dem. |
| D | 5.00 | Eusolex 232 | Phenylbenzimidazolesulfonic acid |
| | 10.00 | Water dem. | Aqua dem |
| E | 0.70 | Sodium hydroxide | Sodium hydroxide |
| | 1.0% | P18 | |
| | q.s. | Preservative | |

(55)

| | | | |
|---|---|---|---|
| A | 5.00 | Cosmacol EMI | Di-C₁₂₋₁₃Alkyl malate |
| | 4.50 | Uvinul MC 80 | Ethylhexyl methoxycinnamate |
| | 3.00 | Uvinul N 539 T | Octocrylene |
| | 2.00 | Uvinul A Plus | Diethylaminohydrobenzoylhexyl |
| | | | benzoate |
| B | 4.00 | Tego Care 450 | Polyglyceryl-3 methylglucose |
| | | | distearate |
| | 5.00 | Isohexadecane | Isohexadecane |
| | 3.50 | Cetiol SN | Cetearyl isononanoate |
| | 0.50 | Vitamin E acetate | Tocopheryl acetate |
| | 1.00 | Ganex V-220 | VP/eicosene copolymer |
| | 2.50 | T-Lite SF | Titanium dioxide, aluminum hydrate, |
| | | | dimethicone/methicone copolymer |
| C | 5.00 | Glycerol 87% | Glycerol |
| | 2.00 | Lanette E | Sodium cetearyl sulfate |
| | 0.30 | Keltrol | Xanthan gum |
| | 1.00 | Pationic 138 C | Sodium lauroyl lactylate |
| | 1.00 | Pationic SSL | Sodium stearoyl lactylate |
| | 41.00 | Water dem. | Aqua dem |
| D | 5.00 | Eusolex 232 | Phenylbenzimidazolesulfonic acid |
| | 2.0% | P18 | |
| | 10.00 | Water dem. | Aqua dem |
| E | 0.70 | Sodium hydroxide | Sodium hydroxid |
| | q.s. | Preservative | |

(56)

| | | | |
|---|---|---|---|
| A | 5.00 | Cosmacol EMI | Di-C₁₂₋₁₃Alkyl malate |
| | 4.50 | Uvinul MC 80 | Ethylhexyl methoxycinnamate |
| | 3.00 | Uvinul N 539 T | Octocrylene |
| | 2.00 | Uvinul A Plus | Diethylaminohydrobenzoylhexyl |
| | | | benzoate |
| B | 4.00 | Tego Care 450 | Polyglyceryl-3 methylglucose |
| | | | distearate |
| | 5.00 | Isohexadecane | Isohexadecane |
| | 3.50 | Cetiol SN | Cetearyl isononanoate |
| | 0.50 | Vitamin E acetate | Tocopheryl acetate |
| | 1.00 | Ganex V-220 | VP/eicosene copolymer |
| | 2.50 | Z-COTE MAX | Zinc oxide (and) |
| | | | diphenylcaprylmethicone |
| C | 5.00 | Glycerol 87% | Glycerol |
| | 2.00 | Lanette E | Sodium cetearyl sulfate |
| | 0.30 | Keltrol | Xanthan gum |
| | 1.00 | Pationic 138 C | Sodium lauroyl lactylate |
| | 1.00 | Pationic SSL | Sodium stearoyl lactylate |
| | 42.50 | Water dem. | Aqua dem |
| D | 5.00 | Eusolex 232 | Phenylbenzimidazolesulfonic acid |
| | 0.5% | P18 | |
| | 10.00 | Water dem. | Aqua dem |
| E | 0.70 | Sodium hydroxide | Sodium hydroxide |
| | q.s. | Preservative | |

(57)

| | | | |
|---|---|---|---|
| A | 5.00 | Cosmacol EMI | Di-C₁₂₋₁₃Alkyl malate |
| | 7.50 | Uvinul N 539 T | Octocrylene |
| | 2.00 | Mexoryl XL | Drometrizole trisiloxane |
| B | 4.00 | Tego Care 450 | Polyglyceryl-3 methylglucose |
| | | | distearate |
| | 5.00 | Isohexadecane | Isohexadecane |
| | 3.50 | Cetiol SN | Cetearyl isononanoate |
| | 0.50 | Vitamin E acetate | Tocopheryl acetate |
| | 1.00 | Ganex V-220 | VP/eicosene copolymer |
| | 5.00 | Z-COTE MAX | Zinc oxide (and) |
| | | | diphenylcaprylmethicone |
| C | 5.00 | Glycerol 87% | Glycerol |
| | 2.00 | Lanette E | Sodium cetearyl sulfate |
| | 0.30 | Keltrol | Xanthan gum |
| | 1.00 | Pationic 138 C | Sodium lauroyl lactylate |
| | 1.00 | Pationic SSL | Sodium stearoyl lactylate |
| | 40.50 | Water dem. | Aqua dem |
| D | 5.00 | Eusolex 232 | Phenylbenzimidazolesulfonic acid |
| | 1.0% | P18 | |
| | 10.00 | Water dem. | Aqua dem |
| E | 0.70 | Sodium hydroxide | Sodium hydroxide |
| | q.s. | Preservative | |

(58)

| | | | |
|---|---|---|---|
| A | 5.00 | Cosmacol EMI | Di-C₁₂₋₁₃Alkyl malate |
| | 5.50 | Uvinul N 539 T | Octocrylene |
| | 2.00 | Uvinul A Plus | Diethylaminohydrobenzoylhexyl |
| | | | benzoate |
| | 2.00 | Mexoryl XL | Drometrizole trisiloxane |
| B | 4.00 | Tego Care 450 | Polyglyceryl-3 methylglucose |
| | | | distearate |
| | 5.00 | Isohexadecane | Isohexadecane |
| | 3.50 | Cetiol SN | Cetearyl isononanoate |
| | 0.50 | Vitamin E acetate | Tocopheryl acetate |
| | 1.00 | Ganex V-220 | VP/eicosene copolymer |
| | 5.00 | Z-COTE MAX | Zinc oxide (and) |
| | | | diphenylcaprylmethicone |
| C | 5.00 | Glycerol 87% | Glycerol |
| | 2.00 | Lanette E | Sodium cetearyl sulfate |
| | 0.30 | Keltrol | Xanthan gum |
| | 1.00 | Pationic 138 C | Sodium lauroyl lactylate |
| | 1.00 | Pationic SSL | Sodium stearoyl lactylate |
| | 41.50 | Water dem. | Aqua dem |
| D | 5.00 | Eusolex 232 | Phenylbenzimidazolesulfonic acid |
| | 0.5% | P18 | |
| | 9.50 | Water dem. | Aqua dem |
| E | 0.70 | Sodium hydroxide | Sodium hydroxide |
| | q.s. | Preservative | |

(59)

| | | | |
|---|---|---|---|
| A | 5.00 | Cosmacol EMI | Di-C₁₂₋₁₃Alkyl malate |
| | 5.50 | Uvinul N 539 T | Octocrylene |
| | 2.00 | Uvinul A Plus | Diethylaminohydrobenzoylhexyl |
| | | | benzoate |
| | 2.00 | Mexoryl XL | Drometrizole trisiloxane |
| B | 4.00 | Tego Care 450 | Polyglyceryl-3 methylglucose |
| | | | distearate |
| | 5.00 | Isohexadecane | Isohexadecane |
| | 3.50 | Cetiol SN | Cetearyl isononanoate |
| | 0.50 | Vitamin E acetate | Tocopheryl acetate |
| | 1.00 | Ganex V-220 | VP/eicosene copolymer |
| | 5.00 | T-Lite SF-S | Titanium dioxide, silicon hydrate, |
| | | | aluminum hydrate, |
| | | | methicone/dimethicone copolymer |
| C | 5.00 | Glycerol 87% | Glycerol |
| | 2.00 | Lanette E | Sodium cetearyl sulfate |
| | 0.30 | Keltrol | Xanthan gum |
| | 1.00 | Pationic 138 C | Sodium lauroyl lactylate |
| | 1.00 | Pationic SSL | Sodium stearoyl lactylate |
| | 40.50 | Water dem. | Aqua dem |
| D | 5.00 | Eusolex 232 | Phenylbenzimidazolesulfonic acid |
| | 1.0% | P18 | |
| | 10.00 | Water dem. | Aqua dem |
| E | 0.70 | Sodium hydroxide | Sodium hydroxide |
| | q.s. | Preservative | |

(60)

| | | | |
|---|---|---|---|
| A | 8.00 | Cetiol B | Dibutyl adipate |
| | 8.00 | Finsolv TN | C₁₂₋₁₅-Alkyl benzoate |
| | 10.00 | Myritol 331 | Cocoglycerides |
| | 1.00 | Lanette E | Sodium cetearyl sulfate |
| | 4.00 | Eumulgin VL 75 | Lauryl glucoside, polyglyceryl-2 |
| | | | dipolyhydroxystearate, glycerol |
| | 2.00 | Lanette O | Cetearyl alcohol |
| | 1.00 | Tinosorb S | Bisethylhexyloxyphenol |
| | | | methoxyphenyltriazine |
| | 1.00 | Uvinul T 150 | Ethylhexyltriazone |
| | 1.00 | Vitamin E acetate | Tocopheryl acetate |
| B | 5.00 | T-Lite SF | Titanium dioxide, aluminum hydrate, |
| | | | dimethicone/methicone copolymer |
| C | 3.00 | Glycerol 87% | Glycerol |
| | 0.05 | Edeta BD | Disodium EDTA |
| | 0.20 | Allantoin | Allantoin |
| | 0.30 | Keltrol | Xanthan gum |
| | 2.0% | P18 | |
| | 1.50 | Veegum Ultra | Magnesium aluminum silicate |
| | ad 100 | Water dem. | Aqua dem |
| D | q.s. | Perfume oil | |
| | q.s. | Preservative | |

(61)

| | | | |
|---|---|---|---|
| A | 8.00 | Cetiol B | Dibutyl adipate |
| | 8.00 | Finsolv TN | C₁₂₋₁₅-Alkyl benzoate |
| | 10.00 | Myritol 331 | Cocoglycerides |
| | 1.00 | Lanette E | Sodium cetearyl sulfate |
| | 4.00 | Eumulgin VL 75 | Lauryl glucoside, polyglyceryl-2 |
| | | | dipolyhydroxystearate, glycerol |
| | 2.00 | Lanette O | Cetearyl alcohol |
| | 1.00 | Tinosorb S | Bisethylhexyloxyphenol |
| | | | methoxyphenyltriazine |
| | 1.00 | Uvinul T 150 | Ethylhexyltriazone |
| | 1.00 | Vitamin E acetate | Tocopheryl acetate |
| B | 5.00 | Z-COTE MAX | Zinc oxide (and) |
| | | | diphenylcaprylmethicone |
| C | 3.00 | Glycerol 87% | Glycerol |
| | 0.05 | Edeta BD | Disodium EDTA |
| | 0.20 | Allantoin | Allantoin |
| | 0.30 | Keltrol | Xanthan gum |
| | 1.0% | P18 | |
| | 1.50 | Veegum Ultra | Magnesium aluminum silicate |
| | ad 100 | Water dem. | Aqua dem |
| D | q.s. | Perfume oil | |
| | q.s. | Preservative | |

(62)

| | | | |
|---|---|---|---|
| A | 3.00 | Glycerol 87% | Glycerol |
| | 0.20 | Edeta BD | Disodium EDTA |
| | 0.30 | Abiol | Imidazolidinylurea |
| | 1.00 | Plantacare 2000 | Decyl glucoside |
| | 0.30 | Keltrol T | Xanthan gum |
| | 57.00 | Water dem. | Aqua dem. |
| B | 5.00 | T-Lite SF-S | Titanium dioxide, silicon |
| | | | hydrate, aluminum hydrate, |
| | | | methicone/dimethicone copolymer |
| C | 7.50 | Uvinul MC 80 | Ethylhexyl methoxycinnamate |
| | 2.00 | Uvinul A Plus | Diethylaminohydroxybenzoylhexyl |
| | | | benzoate |
| | 2.00 | Dow Corning 345 | Cyclopentasiloxane, |
| | | Fluid | cyclohexasiloxane |
| | 3.50 | Cremophor A 6 | Ceteareth-6, stearyl alcohol |
| | 1.50 | Cremophor A 25 | Ceteareth-25 |
| | 0.50 | Beeswax 3044 PH | Beeswax |
| | 3.00 | Lanette O | Cetearyl alcohol |
| | 10.00 | Miglyol 812 | Caprylic/capric triglyceride |
| D | 1.00 | Vitamin E acetate | Tocopheryl acetate |
| | 2.0% | P18 | |
| | 0.20 | Bisabolol rac. | Bisabolol |

(63)

| | | | |
|---|---|---|---|
| A | 3.00 | Glycerol 87% | Glycerol |
| | 0.20 | Edeta BD | Disodium EDTA |
| | 0.30 | Abiol | Imidazolidinylurea |
| | 1.00 | Plantacare 2000 | Decyl glucoside |
| | 0.30 | Keltrol T | Xanthan gum |
| | 58.00 | Water dem. | Aqua dem. |
| B | 5.00 | Z-COTE MAX | Zinc oxide (and) |
| | | | diphenylcaprylmethicone |
| C | 7.50 | Uvinul MC 80 | Ethylhexyl methoxycinnamate |
| | 2.00 | Uvinul A Plus | Diethylaminohydroxybenzoylhexyl |
| | | | benzoate |
| | 2.00 | Dow Corning 345 | Cyclopentasiloxane, |
| | | Fluid | cyclohexasiloxane |
| | 3.50 | Cremophor A 6 | Ceteareth-6, stearyl alcohol |
| | 1.50 | Cremophor A 25 | Ceteareth-25 |
| | 0.50 | Beeswax 3044 PH | Beeswax |
| | 3.00 | Lanette O | Cetearyl alcohol |
| | 10.00 | Miglyol 812 | Caprylic/capric triglyceride |
| D | 1.00 | Vitamin E acetate | Tocopheryl acetate |
| | 1.0% | P18 | |
| | 0.20 | Bisabolol rac. | Bisabolol |

(64)

| | | | |
|---|---|---|---|
| A | 3.00 | Glycerol 87% | Glycerol |
| | 0.20 | Edeta BD | Disodium EDTA |
| | 0.30 | Abiol | Imidazolidinylurea |
| | 1.00 | Plantacare 2000 | Decyl glucoside |
| | 0.30 | Keltrol T | Xanthan gum |
| | 58.50 | Water dem. | Aqua dem. |
| B | 5.00 | T-Lite SF-S | Titanium dioxide, silicon |
| | | | hydrate, aluminum hydrate, |
| | | | methicone/dimethicone copolymer |
| C | 7.50 | Uvinul MC 80 | Ethylhexyl methoxycinnamate |
| | 5.00 | Uvinul N 539 T | Octocrylene |
| | 2.00 | Parsol 1789 | Butylmethoxydibenzoylmethane |
| | 2.00 | Dow Corning 345 | Cyclopentasiloxane, |
| | | Fluid | cyclohexasiloxane |
| | 3.50 | Cremophor A 6 | Ceteareth-6, stearyl alcohol |
| | 1.50 | Cremophor A 25 | Ceteareth-25 |
| | 0.50 | Beeswax 3044 PH | Beeswax |
| | 3.00 | Lanette O | Cetearyl alcohol |
| | 10.00 | Miglyol 812 | Caprylic/capric triglyceride |
| D | 1.00 | Vitamin E acetate | Tocopheryl acetate |
| | 0.5% | P18 | |
| | 0.20 | Bisabolol rac. | Bisabolol |

(65)

| | | | |
|---|---|---|---|
| A | 3.00 | Glycerol 87% | Glycerol |
| | 0.20 | Edeta BD | Disodium EDTA |
| | 0.30 | Abiol | Imidazolidinylurea |
| | 1.00 | Plantacare 2000 | Decyl glucoside |
| | 0.30 | Keltrol T | Xanthan gum |
| | 2.00 | Mexoryl SL | Terephthalidenedicamphorsulfonic |
| | | | acid |
| | 58.40 | Water dem. | Aqua dem. |
| B | 6.00 | T-Lite SF-S | Titanium dioxide, silicon |
| | | | hydrate, aluminum hydrate, |
| | | | methicone/dimethicone copolymer |
| C | 6.00 | Uvinul N 539 T | Octocrylene |
| | 2.00 | Parsol 1789 | Butylmethoxydibenzoylmethane |
| | 2.00 | Dow Corning 345 | Cyclopentasiloxane, |
| | | Fluid | cyclohexasiloxane |
| | 3.50 | Cremophor A 6 | Ceteareth-6, stearyl alcohol |
| | 1.50 | Cremophor A 25 | Ceteareth-25 |
| | 0.50 | Beeswax 3044 PH | Beeswax |
| | 3.00 | Lanette O | Cetearyl alcohol |
| | 10.00 | Miglyol 812 | Caprylic/capric triglyceride |
| D | 1.00 | Vitamin E acetate | Tocopheryl acetate |
| | 0.1% | P18 | |
| | 0.20 | Bisabolol rac. | Bisabolol |

(66)

| | | | |
|---|---|---|---|
| A | 3.00 | Glycerol 87% | Glycerol |
| | 0.20 | Edeta BD | Disodium EDTA |
| | 0.30 | Abiol | Imidazolidinylurea |
| | 1.00 | Plantacare 2000 | Decyl glucoside |
| | 0.30 | Keltrol T | Xanthan gum |
| | 2.00 | Mexoryl SL | Terephthalidenedicamphorsulfonic |
| | | | acid |
| | 58.45 | Water dem. | Aqua dem. |
| B | 6.00 | Z-COTE MAX | Zinc oxide (and) |
| | | | diphenylcaprylmethicone |
| | 6.00 | Uvinul N 539 T | Octocrylene |
| | 2.00 | Parsol 1789 | Butylmethoxydibenzoylmethane |
| | 2.00 | Dow Corning 345 | Cyclopentasiloxane, |
| | | Fluid | cyclohexasiloxane |
| | 3.50 | Cremophor A 6 | Ceteareth-6, stearyl alcohol |
| | 1.50 | Cremophor A 25 | Ceteareth-25 |
| | 0.50 | Beeswax 3044 PH | Beeswax |
| | 3.00 | Lanette O | Cetearyl alcohol |
| | 10.00 | Miglyol 812 | Caprylic/capric triglyceride |
| D | 1.00 | Vitamin E acetate | Tocopheryl acetate |
| | 0.05% | P18 | |
| | 0.20 | Bisabolol rac. | Bisabolol |

(67)

| | | | |
|---|---|---|---|
| A | 3.00 | Glycerol 87% | Glycerol |
| | 0.20 | Edeta BD | Disodium EDTA |
| | 0.30 | Abiol | Imidazolidinylurea |
| | 1.00 | Plantacare 2000 | Decyl glucoside |
| | 0.30 | Keltrol T | Xanthan gum |
| | 2.00 | Neoheliopan AP | Disodium |
| | | | phenyldibenzimidazoletetrasulfonate |
| | 57.50 | Water dem. | Aqua dem. |
| B | 6.00 | Z-COTE MAX | Zinc oxide (and) |
| | | | diphenylcaprylmethicone |
| | 6.00 | Uvinul N 539 T | Octocrylene |
| | 2.00 | Parsol 1789 | Butylmethoxydibenzoylmethane |
| | 2.00 | Dow Corning 345 | Cyclopentasiloxane, |
| | | Fluid | cyclohexasiloxane |
| | 3.50 | Cremophor A 6 | Ceteareth-6, stearyl alcohol |
| | 1.50 | Cremophor A 25 | Ceteareth-25 |
| | 0.50 | Beeswax 3044 PH | Beeswax |
| | 3.00 | Lanette O | Cetearyl alcohol |
| | 10.00 | Miglyol 812 | Caprylic/capric triglyceride |
| D | 1.00 | Vitamin E acetate | Tocopheryl acetate |
| | 1.0% | P18 | |
| | 0.20 | Bisabolol rac. | Bisabolol |

(68)

| | | | |
|---|---|---|---|
| A | 25.00 | Dow Corning 345 | Cyclopentasiloxane, |
| | | Fluid | cyclohexasiloxane |
| | 20.00 | Dow Corning 245 | Cyclopentasiloxane |
| | | Fluid | |
| | 8.00 | Uvinul MC 80 | Ethylhexyl methoxycinnamate |
| | 4.00 | Abil EM 90 | Cetyl-PEG-/PPG-10-/1-dimethicone |
| | 7.00 | T-Lite SF | Titanium dioxide, aluminum hydrate, |
| | | | dimethicone/methicone copolymer |
| B | 17.00 | Ethanol 95% | Alcohol |
| | 10.00 | Z-COTE MAX | Zinc oxide (and) |
| | | | diphenylcaprylmethicone |
| | 4.50 | Water dem. | Aqua dem. |
| | 3.00 | Glycerol 87% | Glycerol |
| | 0.5% | P18 | |
| | 1.00 | Talc | Talc |

(69)

| | | | |
|---|---|---|---|
| A | 25.00 | Dow Corning 345 | Cyclopentasiloxane, |
| | | Fluid | cyclohexasiloxane |
| | 20.00 | Dow Corning 245 | Cyclopentasiloxane |
| | | Fluid | |
| | 8.00 | Uvinul MC 80 | Ethylhexyl methoxycinnamate |
| | 4.00 | Abil EM 90 | Cetyl-PEG-/PPG-10-/1-dimethicone |
| | 7.00 | T-Lite SF-S | Titanium dioxide, silicon |
| | | | hydrate, aluminum hydrate, |
| | | | methicone/dimethicone copolymer |
| B | 17.00 | Ethanol 95% | Alcohol |
| | 9.99 | Z-COTE MAX | Zinc oxide (and) |
| | | | diphenylcaprylmethicone |
| | 5.00 | Water dem. | Aqua dem. |
| | 3.00 | Glycerol 87% | Glycerol |
| | 0.01% | P18 | |
| | 1.00 | Talc | Talc |

(70)

| | | | |
|---|---|---|---|
| A | 20.00 | Dow Corning 345 | Cyclopentasiloxane, |
| | | Fluid | cyclohexasiloxane |
| | 10.00 | Dow Corning 245 | Cyclopentasiloxane |
| | | Fluid | |
| | 7.50 | Uvinul MC 80 | Ethylhexyl methoxycinnamate |
| | 2.00 | Uvinul T 150 | Ethylhexyltriazone |
| | 12.00 | Cosmacol EMI | Di-C₁₂₋₁₃-alkyl malate |
| | 4.00 | Abil EM 90 | Cetyl-PEG-/PPG-10-/1-dimethicone |
| B | 7.00 | T-Lite SF | Titanium dioxide, aluminum hydrate, |
| | | | dimethicone/methicone copolymer |
| C | 15.00 | Ethanol 95% | Alcohol |
| | 10.00 | Z-COTE MAX | Zinc oxide (and) |
| | | | diphenylcaprylmethicone |
| | 3.00 | Glycerol 87% | Glycerol |
| | 1.5% | P18 | |
| | 8.00 | Water dem. | Aqua dem. |

(71)

| | | | |
|---|---|---|---|
| A | 20.00 | Dow Corning 345 Fluid | Cyclopentasiloxane, |
| | | | cyclohexasiloxane |
| | 10.00 | Dow Corning 245 Fluid | Cyclopentasiloxane |
| | 7.50 | Uvinul MC 80 | Ethylhexyl methoxycinnamate |
| | 2.00 | Tinosorb S | Bisethylhexyloxyphenol |
| | | | methoxyphenyltriazine |
| | 12.00 | Cosmacol EMI | Di-C₁₂₋₁₃-alkyl malate |
| | 4.00 | Abil EM 90 | Cetyl-PEG-/PPG-10-/ |
| | | | 1-dimethicone |
| B | 7.00 | T-Lite SF | Titanium dioxide, aluminum |
| | | | hydrate, dimethicone/methicone |
| | | | copolymer |
| C | 15.00 | Ethanol 95% | Alcohol |
| | 10.00 | Z-COTE MAX | Zinc oxide (and) |
| | | | diphenylcaprylmethicone |
| | 3.00 | Glycerol 87% | Glycerol |
| | 0.5% | P18 | |
| | 9.00 | Water dem. | Aqua dem. |

(72)

| | | | |
|---|---|---|---|
| A | 2.00 | Cremophor WO 7 | PEG-7-hydrogenated castor oil |
| | 6.00 | Abil B 8839 | Cyclopentasiloxane, |
| | | | cyclohexasiloxane |
| | 3.00 | T-Lite SF | Titanium dioxide, aluminum hydrate, |
| | | | dimethicone/methicone copolymer |
| | 4.00 | Isopropyl palmitate | Isopropyl palmitate |
| | 1.00 | Abil 350 | Dimethicone |
| B | 7.00 | Uvinul MC 80 | Ethylhexyl methoxycinnamate |
| | 1.00 | Uvinul T 150 | Ethylhexyltriazone |
| | 7.00 | Finsolv TN | C₁₂₋₁₅-Alkyl benzoate |
| | 4.00 | Abil WE 09 | Polyglyceryl-4 isostearate, |
| | | | cetyl-PEG-/PPG-10-/1-dimethicone, |
| | | | hexyl laurate |
| C | 0.50 | Sodium chloride | Sodium chloride |
| | 0.20 | Edeta BD | Disodium EDTA |
| | 61.30 | Water dem. | Aqua dem |
| D | 1.00 | Vitamin E acetate | Tocopheryl acetate |
| | 1.0% | P18 | |
| | q.s. | Preservative | |

(73)

| | | | |
|---|---|---|---|
| A | 2.00 | Cremophor WO 7 | PEG-7-hydrogenated castor oil |
| | 6.00 | Abil B 8839 | Cyclopentasiloxane, |
| | | | cyclohexasiloxane |
| | 3.00 | Z-COTE MAX | Zinc oxide (and) |
| | | | diphenylcaprylmethicone |
| | 4.00 | Isopropyl palmitate | Isopropyl palmitate |
| | 1.00 | Abil 350 | Dimethicone |
| B | 7.00 | Uvinul MC 80 | Ethylhexyl methoxycinnamate |
| | 1.00 | Uvinul T 150 | Ethylhexyltriazone |
| | 7.00 | Finsolv TN | C₁₂₋₁₅-Alkyl benzoate |
| | 4.00 | Abil WE 09 | Polyglyceryl-4 isostearate, |
| | | | cetyl-PEG-/PPG-10-/1-dimethicone, |
| | | | hexyl laurate |
| C | 0.50 | Sodium chloride | Sodium chloride |
| | 0.20 | Edeta BD | Disodium EDTA |
| | 62.20 | Water dem. | Aqua dem |
| D | 1.00 | Vitamin E acetate | Tocopheryl acetate |
| | 0.1% | P18 | |
| | q.s. | Preservative | |

(74)

| | | | |
|---|---|---|---|
| A | 2.00 | Cremophor WO 7 | PEG-7-hydrogenated castor oil |
| | 6.00 | Abil B 8839 | Cyclopentasiloxane, |
| | | | cyclohexasiloxane |
| | 3.00 | Z-COTE MAX | Zinc oxide (and) |
| | | | diphenylcaprylmethicone |
| | 4.00 | Isopropyl palmitate | Isopropyl palmitate |
| | 1.00 | Abil 350 | Dimethicone |
| B | 7.00 | Uvinul MC 80 | Ethylhexyl methoxycinnamate |
| | 1.00 | Tinosorb S | Bisethylhexyloxyphenol |
| | | | methoxyphenyltriazine |
| | 7.00 | Finsolv TN | C₁₂₋₁₅-Alkyl benzoate |
| | 4.00 | Abil WE 09 | Polyglyceryl-4 isostearate, |
| | | | cetyl-PEG-/PPG-10-/1-dimethicone, |
| | | | hexyl laurate |
| C | 0.50 | Sodium chloride | Sodium chloride |
| | 0.20 | Edeta BD | Disodium EDTA |
| | 60.30 | Water dem. | Aqua dem |
| D | 1.00 | Vitamin E acetate | Tocopheryl acetate |
| | 2.0% | P18 | |
| | q.s. | Preservative | |

(75)

| | | | |
|---|---|---|---|
| A | 2.00 | Cremophor WO 7 | PEG-7-hydrogenated castor oil |
| | 6.00 | Abil B 8839 | Cyclopentasiloxane, |
| | | | cyclohexasiloxane |
| | 6.00 | Z-COTE MAX | Zinc oxide (and) |
| | | | diphenylcaprylmethicone |
| | 4.00 | Isopropyl palmitate | Isopropyl palmitate |
| | 1.00 | Abil 350 | Dimethicone |
| B | 4.00 | Uvinul N 539 T | Octocrylene |
| | 1.00 | Tinosorb S | Bisethylhexyloxyphenol |
| | | | methoxyphenyltriazine |
| | 7.00 | Finsolv TN | C₁₂₋₁₅-Alkyl benzoate |
| | 4.00 | Abil WE 09 | Polyglyceryl-4 isostearate, |
| | | | cetyl-PEG-/PPG-10-/1-dimethicone, |
| | | | hexyl laurate |
| C | 0.50 | Sodium chloride | Sodium chloride |
| | 0.20 | Edeta BD | Disodium EDTA |
| | 62.10 | Water dem. | Aqua dem |
| D | 1.00 | Vitamin E acetate | Tocopheryl acetate |
| | 0.2% | P18 | |
| | q.s. | Preservative | |

(76)

| | | | |
|---|---|---|---|
| A | 2.00 | Cremophor WO 7 | PEG-7-hydrogenated castor oil |
| | 6.00 | Abil B 8839 | Cyclopentasiloxane, |
| | | | cyclohexasiloxane |
| | 6.00 | Z-COTE MAX | Zinc oxide (and) |
| | | | diphenylcaprylmethicone |
| | 4.00 | Isopropyl palmitate | Isopropyl palmitate |
| | 1.00 | Abil 350 | Dimethicone |
| B | 3.00 | Uvinul N 539 T | Octocrylene |
| | 1.00 | Mexoryl XL | Drometrizole trisiloxane |
| | 1.00 | Tinosorb S | Bisethylhexyloxyphenol |
| | | | methoxyphenyltriazine |
| | 7.00 | Finsolv TN | C₁₂₋₁₅-Alkyl benzoate |
| | 4.00 | Abil WE 09 | Polyglyceryl-4 isostearate, |
| | | | cetyl-PEG-/PPG-10-/1-dimethicone, |
| | | | hexyl laurate |
| C | 0.50 | Sodium chloride | Sodium chloride |
| | 0.20 | Edeta BD | Disodium EDTA |
| | 1.0% | P18 | |
| | 61.30 | Water dem. | Aqua dem |
| D | 1.00 | Vitamin E acetate | Tocopheryl acetate |
| | q.s. | Preservative | |

(77)

| | | | |
|---|---|---|---|
| A | 2.00 | Cremophor WO 7 | PEG-7-hydrogenated castor oil |
| | 6.00 | Abil B 8839 | Cyclopentasiloxane, |
| | | | cyclohexasiloxane |
| | 6.00 | T-Lite SF-S | Titanium dioxide, silicon hydrate, |
| | | | aluminum hydrate, methicone/ |
| | | | dimethicone copolymer |
| | 4.00 | Isopropyl palmitate | Isopropyl palmitate |
| | 1.00 | Abil 350 | Dimethicone |
| B | 3.00 | Uvinul N 539 T | Octocrylene |
| | 1.00 | Mexoryl XL | Drometrizole trisiloxane |
| | 1.00 | Tinosorb S | Bisethylhexyloxyphenol |
| | | | methoxyphenyltriazine |
| | 7.00 | Finsolv TN | C₁₂₋₁₅-Alkyl benzoate |
| | 4.00 | Abil WE 09 | Polyglyceryl-4 isostearate, |
| | | | cetyl-PEG-/PPG-10-/1-dimethicone, |
| | | | hexyl laurate |
| C | 0.50 | Sodium chloride | Sodium chloride |
| | 0.20 | Edeta BD | Disodium EDTA |
| | 61.80 | Water dem. | Aqua dem |
| D | 1.00 | Vitamin E acetate | Tocopheryl acetate |
| | 0.5% | P18 | |
| | q.s. | Preservative | |

(78)

| | | | |
|---|---|---|---|
| A | 4.50 | Uvinul MC 80 | Ethylhexyl methoxycinnamate |
| | 3.00 | Uvinul N 539 T | Octocrylene |
| | 1.00 | Uvinul T 150 | Ethylhexyltriazone |
| | 2.50 | Cosmacol EMI | Di-C₁₂₋₁₃-alkyl malate |
| B | 0.50 | Vitamin E acetate | Tocopheryl acetate |
| | 4.00 | Tego Care 450 | Polyglyceryl-3 methylglucose distearate |
| C | 3.50 | Cetiol SN | Cetearyl isononanoate |
| | 1.00 | Ganex V-220 | VP/eicosene copolymer |
| | 5.00 | Isohexadecane | Isohexadecane |
| | 2.50 | Cosmacol EMI | Di-C₁₂₋₁₃-alkyl malate |
| | 5.00 | Z-COTE MAX | Zinc oxide (and) |
| | | | diphenylcaprylmethicone |
| D | 44.00 | Water dem. | Aqua dem. |
| | 5.00 | Glycerol 87% | Glycerol |
| | 1.00 | Lanette E | Sodium cetearyl sulfate |
| | 15.00 | Luviquat Care | Polyquaternium-44 |
| | 1.0% | P18 | |
| | 0.50 | Keltrol | Xanthan gum |
| E | 1.00 | Phenonip | |

(79)

| | | | |
|---|---|---|---|
| A | 4.50 | Uvinul MC 80 | Ethylhexyl methoxycinnamate |
| | 3.00 | Uvinul N 539 T | Octocrylene |
| | 1.00 | Tinosorb S | Bisethoxyhexyloxyphenol |
| | | | methoxyphenyltriazine |
| | 2.50 | Cosmacol EMI | Di-C₁₂₋₁₃-alkyl malate |
| B | 0.50 | Vitamin E acetate | Tocopheryl acetate |
| | 4.00 | Tego Care 450 | Polyglyceryl-3 methylglucose distearate |
| C | 3.50 | Cetiol SN | Cetearyl isononanoate |
| | 1.00 | Ganex V-220 | VP/eicosene copolymer |
| | 5.00 | Isohexadecane | Isohexadecane |
| | 2.50 | Cosmacol EMI | Di-C₁₂₋₁₃-alkyl malate |
| | 5.00 | Z-COTE MAX | Zinc oxide (and) |
| | | | diphenylcaprylmethicone |
| D | 44.90 | Water dem. | Aqua dem. |
| | 5.00 | Glycerol 87% | Glycerol |
| | 1.00 | Lanette E | Sodium cetearyl sulfate |
| | 15.00 | Luviquat Care | Polyquaternium-44 |
| | 0.1% | P18 | |
| | 0.50 | Keltrol | Xanthan gum |
| E | 1.00 | Phenonip | |

(80)

| | | | |
|---|---|---|---|
| A | 1.50 | Mexoryl XL | Drometrizole trisiloxane |
| | 5.00 | Uvinul N 539 T | Octocrylene |
| | 1.00 | Tinosorb S | Bisethylhexyloxyphenol |
| | | | methoxyphenyltriazine |
| | 2.50 | Cosmacol EMI | Di-C₁₂₋₁₃-alkyl malate |
| B | 0.50 | Vitamin E acetate | Tocopheryl acetate |
| | 4.00 | Tego Care 450 | Polyglyceryl-3 methylglucose distearate |
| C | 3.50 | Cetiol SN | Cetearyl isononanoate |
| | 1.00 | Ganex V-220 | VP/eicosene copolymer |
| | 5.00 | Isohexadecane | Isohexadecane |
| | 2.50 | Cosmacol EMI | Di-C₁₂₋₁₃-alkyl malate |
| | 5.00 | Z-COTE MAX | Zinc oxide (and) |
| | | | diphenylcaprylmethicone |
| D | 44.50 | Water dem. | Aqua dem. |
| | 5.00 | Glycerol 87% | Glycerol |
| | 1.00 | Lanette E | Sodium cetearyl sulfate |
| | 15.00 | Luviquat Care | Polyquaternium-44 |
| | 1.5% | P18 | |
| | 0.50 | Keltrol | Xanthan gum |
| E | 1.00 | Phenonip | |

(81)

| | | | |
|---|---|---|---|
| A | 1.50 | Mexoryl XL | Drometrizole trisiloxane |
| | 5.00 | Uvinul N 539 T | Octocrylene |
| | 1.00 | Tinosorb S | Bisethylhexyloxyphenol |
| | | | methoxyphenyltriazine |
| | 2.50 | Cosmacol EMI | Di-C₁₂₋₁₃-alkyl malate |
| B | 0.50 | Vitamin E acetate | Tocopheryl acetate |
| | 4.00 | Tego Care 450 | Polyglyceryl-3 methylglucose distearate |
| C | 3.50 | Cetiol SN | Cetearyl isononanoate |
| | 1.00 | Ganex V-220 | VP/eicosene copolymer |
| | 5.00 | Isohexadecane | Isohexadecane |
| | 2.50 | Cosmacol EMI | Di-C₁₂₋₁₃-alkyl malate |
| | 5.00 | T-Lite SF | Titanium dioxide, aluminum hydrate, |
| | | | dimethicone/methicone copolymer |
| D | 45.00 | Water dem. | Aqua dem. |
| | 5.00 | Glycerol 87% | Glycerol |
| | 1.00 | Lanette E | Sodium cetearyl sulfate |
| | 15.00 | Luviquat Care | Polyquaternium-44 |
| | 1.0% | P18 | |
| | 0.50 | Keltrol | Xanthan gum |
| E | 1.00 | Phenonip | |

(82)

| | | | |
|---|---|---|---|
| A | 1.00 | Abil Care 85 | Bis-PEG-/PPG-16-/16-PEG-/ |
| | | | PPG-16-/16-dimethicone, |
| | | | caprylic/capric triglyceride |
| | 3.00 | Cremophor CO 40 | PEG-40-hydrogenated castor oil |
| | 0.30 | Cremophor WO 7 | PEG-7-hydrogenated castor oil |
| | 5.00 | Uvinul MC 80 | Ethylhexyl methoxycinnamate |
| | 10.00 | Witconol APM | PPG-3 myristyl ether |
| | 2.00 | Uvinul T 150 | Ethylhexyltriazone |
| | 1.00 | Dow Corning 345 | Cyclopentasiloxane, |
| | | Fluid | cyclohexasiloxane |
| | 5.00 | Uvinul N 539 T | Octocrylene |
| B | 5.00 | Z-COTE MAX | Zinc oxide (and) |
| | | | diphenylcaprylmethicone |
| C | 5.00 | 1,2-Propylene glycol | Propylene glycol |
| | 0.20 | Keltrol | Xanthan gum |
| | 0.10 | Edeta BD | Disodium EDTA |
| | 2.0% | P18 | |
| | 1.50 | Simulgel 600 | Acrylamide/sodium |
| | | | acryloyldimethyltaurate copolymer, |
| | | | isohexadecane, polysorbate 80 |
| | 58.40 | Water dem. | Aqua dem. |
| D | q.s. | Perfume oil | |
| | 0.50 | Glydant | DMDM hydantoin |

(83)

| | | | |
|---|---|---|---|
| A | 2.00 | Abil Care 85 | Bis-PEG-/PPG-16-/16-PEG-/ |
| | | | PPG-16-/16-dimethicone, |
| | | | caprylic/capric triglyceride |
| | 4.00 | Finsolv TN | C₁₂₋₁₅-Alkyl benzoate |
| | 1.50 | Miglyol 812 | Caprylic/capric triglyceride |
| | 0.50 | Vitamin E acetate | Tocopheryl acetate |
| | 7.50 | Uvinul MC 80 | Ethylhexyl methoxycinnamate |
| | 4.00 | Cetiol B | Dibutyl adipate |
| | 3.00 | Luvitol EHO | Cetearyl ethylhexanoate |
| | 1.00 | Cremophor CO 40 | PEG-40-hydrogenated castor oil |
| | 1.00 | Paraffin oil, thin-liquid | Mineral oil |
| | 3.00 | Plantacare 2000 | Decyl glucoside |
| | 0.50 | Phenonip | |
| | q.s. | Perfume oil | |
| B | 4.00 | Z-COTE MAX | Zinc oxide (and) |
| | | | diphenylcaprylmethicone |
| C | 2.00 | Simulgel NS | Hydroxyethyl acrylate/sodium |
| | | | acryloyldimethyltaurate copolymer, |
| | | | squalane, polysorbate 60 |
| | 0.20 | Keltrol | Xanthan gum |
| | 0.10 | Edeta BD | Disodium EDTA |
| | 1.0% | P18 | |
| | 64.20 | Water dem. | Aqua dem |

(84)

| | | | |
|---|---|---|---|
| A | 6.00 | Gilugel SIL 5 | Cyclomethicone (and) |
| | | | aluminum-/magnesium |
| | | | hydroxide stearate |
| | 5.00 | Uvinul MC 80 | Ethylhexyl methoxycinnamate |
| | 2.00 | Uvinul A Plus | Diethylaminohydroxybenzoylhexyl |
| | | | benzoate |
| | 1.00 | Uvinul T 150 | Ethylhexyltriazone |
| | 7.00 | Finsolv TN | C₁₂₋₁₅-Alkyl benzoate |
| | 4.00 | Abil WE 09 | Polyglyceryl-4 isostearate, |
| | | | cetyl-PEG-/PPG-10-/1-dimethicone, |
| | | | hexyl laurate |
| | 2.00 | Cosmacol EMI | Di-C₁₂₋₁₃-alkyl malate |
| | 3.00 | Isopropyl palmitate | Isopropyl palmitate |
| | 5.00 | Abil B 8839 | Cyclopentasiloxane, |
| | | | cyclohexasiloxane |
| | 0.50 | Abil 350 | Dimethicone |
| B | 0.50 | Sodium chloride | Sodium chloride |
| | 0.20 | Edeta BD | Disodium EDTA |
| | 0.2% | P18 | |
| | 62.10 | Water dem. | Aqua dem. |
| C | 1.00 | Vitamin E acetate | Tocopheryl acetate |
| | 0.50 | Phenonip | |

(85)

| | | | |
|---|---|---|---|
| A | 4.50 | Uvinul MC 80 | Ethylhexyl methoxycinnamate |
| | 2.00 | Tinosorb S | Bisethylhexyloxyphenol |
| | | | methoxyphenyltriazine |
| | 3.00 | Uvinul N 539 T | Octocrylene |
| | 2.50 | Cosmacol EMI | Di-C₁₂₋₁₃-alkyl malate |
| | 0.50 | Vitamin E acetate | Tocopheryl acetate |
| | 4.00 | Tego Care 450 | Polyglyceryl-3 methylglucose distearate |
| B | 3.50 | Cetiol SN | Cetearyl isononanoate |
| | 1.00 | Ganex V-220 | VP/eicosene copolymer |
| | 5.00 | Isohexadecane | Isohexadecane |
| | 2.50 | Cosmacol EMI | Di-C₁₂₋₁₃-alkyl malate |
| | 3.00 | T-Lite SF | Titanium dioxide, aluminum hydrate, |
| | | | dimethicone/methicone copolymer |
| C | 5.00 | Glycerol 87% | Glycerol |
| | 1.00 | Lanette E | Sodium cetearyl sulfate |
| | 0.50 | Keltrol | Xanthan gum |
| | 1.0% | P18 | |
| | 59.70 | Water dem. | Aqua dem. |
| D | 1.00 | Phenonip | |
| | 0.30 | Bisabolol rac. | Bisabolol |

(86)

| | | | |
|---|---|---|---|
| A | 2.00 | Abil Care 85 | Bis-PEG-/PPG-16-/16-PEG-/PPG-16-/ |
| | | | 16-dimethicone, caprylic/capric |
| | | | triglyceride |
| | 4.00 | Finsolv TN | C₁₂₋₁₅-Alkyl benzoate |
| | 1.50 | Miglyol 812 | Caprylic/capric triglyceride |
| | 0.50 | Vitamin E acetate | Tocopheryl acetate |
| | 7.50 | Uvinul MC 80 | Ethylhexyl methoxycinnamate |
| | 4.00 | Cetiol B | Dibutyl adipate |
| | 1.00 | Luvitol EHO | Cetearyl ethylhexanoate |
| | 1.00 | Cremophor | PEG-40 hydrogenated castor oil |
| | | CO 40 | |
| | 1.00 | Paraffin oil, | Mineral oil |
| | | thin-liquid | |
| | 3.00 | Plantacare 2000 | Decyl glucoside |
| | 1.00 | Uvinul A Plus | Diethylaminohydroxybenzoylhexyl |
| | | | benzoate |
| | 0.50 | Phenonip | |
| | 2.50 | Uvinul T 150 | Ethylhexyltriazone |
| | q.s. | Perfume oil | |
| B | 4.00 | Z-COTE MAX | Zinc oxide (and) diphenylcapryl- |
| | | | methicone |
| C | 2.00 | Simulgel NS | Hydroxyethyl acrylate/sodium |
| | | | acryloyldimethyltaurate copolymer, |
| | | | squalane, polysorbate 60 |
| | 0.10 | Keltrol | Xanthan gum |
| | 0.10 | Edeta BD | Disodium EDTA |
| | 0.5% | P18 | |
| | 59.90 | Water dem | Aqua dem. |

(87)

| | | | |
|---|---|---|---|
| A | 4.00 | Eumulgin VL 75 | Lauryl glucoside, polyglyceryl-2 |
| | | | dipolyhydroxystearate, glycerol |
| | 2.00 | Lanette O | Cetearyl alcohol |
| | 12.00 | Myritol 331 | Cocoglycerides |
| | 8.00 | Finsolv TN | C₁₂₋₁₅-Alkyl benzoate |
| | 8.00 | Cetiol B | Dibutyl adipate |
| B | 6.00 | T-Lite SF | Titanium dioxide, aluminum hydrate, |
| | | | dimethicone/methicone copolymer |
| | 5.00 | Z-COTE MAX | Zinc oxide (and) diphenylcapryl- |
| | | | methicone |
| C | 3.00 | Glycerol 87% | Glycerol |
| | 0.10 | Edeta BD | Disodium EDTA |
| | 1.50 | Veegum Ultra | Magnesium aluminum silicate |
| | 1.50 | Lanette E | Sodium cetearyl sulfate |
| | 2.0% | P18 | |
| | 0.30 | Keltrol | Xanthan gum |
| | 45.10 | Water dem. | Water |
| D | 1.00 | Phenonip | Phenoxyethanol, methyl paraben, |
| | | | ethyl paraben, butyl paraben, |
| | | | propyl paraben, isobutyl paraben |

(88)

| | | | |
|---|---|---|---|
| A | 4.00 | Eumulgin VL 75 | Lauryl glucoside, polyglyceryl-2 |
| | | | dipolyhydroxystearate, glycerol |
| | 2.00 | Lanette O | Cetearyl alcohol |
| | 12.00 | Myritol 331 | Cocoglycerides |
| | 8.00 | Finsolv TN | C₁₂₋₁₅-Alkyl benzoate |
| | 8.00 | Cetiol B | Dibutyl adipate |
| B | 6.00 | Uvinul N 539 T | Octocrylene |
| | 5.00 | Z-COTE MAX | Zinc oxide (and) diphenylcapryl- |
| | | | methicone |
| C | 3.00 | Glycerol 87% | Glycerol |
| | 0.10 | Edeta BD | Disodium EDTA |
| | 1.50 | Veegum Ultra | Magnesium aluminum silicate |
| | 1.50 | Lanette E | Sodium cetearyl sulfate |
| | 0.30 | Carbopol Ultrez 10 P | Carbomer |
| | 1.0% | P18 | |
| | 46.10 | Water dem. | Aqua dem. |
| D | 1.00 | Phenonip | Phenoxyethanol, methyl paraben, |
| | | | ethyl paraben, butyl paraben, |
| | | | propyl paraben, isobutyl paraben |

(89)

| | | | |
|---|---|---|---|
| A | 4.00 | Eumulgin VL 75 | Lauryl glucoside, polyglyceryl-2 |
| | | | dipolyhydroxystearate, glycerol |
| | 2.00 | Lanette O | Cetearyl alcohol |
| | 10.00 | Myritol 331 | Cocoglycerides |
| | 8.00 | Finsolv TN | C₁₂₋₁₅-Alkyl benzoate |
| | 8.00 | Cetiol B | Dibutyl adipate |
| B | 2.00 | Uvinul A Plus | Diethylaminohydroxybenzoylhexyl |
| | | | benzoate |
| | 5.00 | Z-COTE MAX | Zinc oxide (and) diphenylcapryl- |
| | | | methicone |
| C | 3.00 | Glycerol 87% | Glycerol |
| | 0.10 | Edeta BD | Disodium EDTA |
| | 1.50 | Veegum Ultra | Magnesium aluminum silicate |
| | 1.50 | Lanette E | Sodium cetearyl sulfate |
| | 5.0% | P18 | |
| | 0.30 | Carbopol Ultrez 10 P | Carbomer |
| | ad | Water dem. | Water |
| D | 1.00 | Phenonip | Phenoxyethanol, methyl paraben, |
| | | | ethyl paraben, butyl paraben, |
| | | | propyl paraben, isobutyl paraben |

(90)

| | | | |
|---|---|---|---|
| A | 3.50 | Cremophor A 6 | Ceteareth-6, stearyl alcohol |
| | 1.50 | Cremophor A 25 | Ceteareth-25 |
| | 7.50 | Uvinul MC 80 | Ethylhexyl methoxycinnamate |
| | 2.00 | Uvinul A Plus | Diethylaminohydroxybenzoylhexyl |
| | | | benzoate |
| | 2.00 | Dow Corning 345 | Cyclopentasiloxane, |
| | | | cyclohexasiloxane fluid |
| | 0.50 | Beeswax 3044 PH | Beeswax |
| | 3.00 | Lanette O | Cetearyl alcohol |
| | 10.00 | Miglyol 812 | Caprylic/capric triglyceride |
| B | 5.00 | T-Lite SF-S | Titanium dioxide, silicon hydrate, |
| | | | aluminum hydrate, methicone/ |
| | | | dimethicone copolymer |
| C | 3.00 | Glycerol 87% | Glycerol |
| | 0.20 | Edeta BD | Disodium EDTA |
| | 0.30 | Keltrol T | Xanthan gum |
| | 1.00 | Plantacare 2000 | Decyl glucoside |
| | 2.0% | P18 | |
| | 57.30 | Water dem. | Aqua dem. |
| D | 1.00 | Vitamin E acetate | Tocopheryl acetate |
| | 0.20 | Bisabolol rac. | Bisabolol |

(91)

| | | | |
|---|---|---|---|
| A | 10.00 | Uvinul A Plus B | Ethylhexyl methoxycinnamate, |
| | | | diethylaminohydroxybenzoylhexyl |
| | | | benzoate |
| | 10.00 | Uvinul N 539 T | Octocrylene |
| | 4.00 | Eumulgin VL 75 | Lauryl glucoside, polyglyceryl-2 |
| | | | dipolyhydroxystearate, glycerol |
| | 8.00 | Cetiol B | Dibutyl adipate |
| | 8.00 | Finsolv TN | C₁₂₋₁₅-Alkyl benzoate |
| | 12.00 | Myritol 331 | Cocoglycerides |
| | 1.00 | Lanette E | Sodium cetearyl sulfate |
| | 2.00 | Lanette O | Cetearyl alcohol |
| B | 3.00 | Z-COTE MAX | Zinc oxide (and) diphenylcapryl- |
| | | | methicone |
| C | 35.08 | Water dem. | Aqua dem. |
| | 0.38 | Citric acid | Citric acid |
| | 2.9 | Glycerol 87% | Glycerol |
| | 0.05 | Edeta BD | Disodium EDTA |
| | 0.20 | Allantoin | Allantoin |
| | 0.30 | Keltrol | Xanthan gum |
| | 0.1% | P18 | |
| | 1.50 | Veegum Ultra | Magnesium aluminum silicate |
| D | 0.50 | Phenonip | |
| | 1.00 | Vitamin E acetate | Tocopheryl acetate |

(92)

| | | | |
|---|---|---|---|
| A | 0.70 | Cremophor A 25 | Ceteareth-25 |
| | 1.70 | Cremophor A 6 | Ceteareth-6, stearyl alcohol |
| | 2.00 | Uvinul A Plus | Diethylaminohydroxybenzoylhexyl |
| | | | benzoate |
| | 3.00 | Uvinul N 539 T | Octocrylene |
| | 3.00 | Z-COTE MAX | Zinc oxide (and) diphenylcapryl- |
| | | | methicone |
| | 2.00 | Abil B 8843 | PEG-14 dimethicone |
| | 3.60 | Lanette O | Cetearyl alcohol |
| | 4.00 | Uvinul MC 80 | Ethylhexyl methoxycinnamate |
| | 2.00 | Cetiol B | Dibutyl adipate |
| B | 4.00 | Glycerol 87% | Glycerol |
| | 0.20 | Edeta BD | Disodium EDTA |
| | 71.00 | Water dem. | Panthenol |
| C | 4.00 | Luvigel EM | Caprylic/capric triglyceride, sodium |
| | | | acrylate copolymer |
| D | 1.00 | Vitamin E acetate | Tocopheryl acetate |
| | 1.0% | P18 | |
| | 0.20 | Bisabolol rac. | Bisabolol |
| | q.s. | Preservative | |

(93)

| | | | |
|---|---|---|---|
| A | 7.50 | Uvinul MC 80 | Ethylhexyl methoxycinnamate |
| | 5.00 | Uvinul N 539 T | Octocrylene |
| | 3.00 | Emulgade PL 68/50 | Cetearyl glucoside, cetearyl |
| | | | alcohol |
| | 2.00 | Dracorin 100 SE | Glyceryl stearate, PEG-100 |
| | | | stearates |
| | 1.00 | Fitoderm | Squalane |
| | 0.50 | Cremophor WO 7 | PEG-7 hydrogenated castor oil |
| | 0.50 | Cremophor PS 20 | Polysorbate 20 |
| | 2.00 | Dry Flo Pure | Aluminum starch octenyl succinate |
| B | 5.00 | Z-COTE MAX | Zinc oxide (and) diphenylcapryl- |
| | | | methicone |
| | 0.03 | Sicomet Blue P 77 007 | C.I. 77 007, Ultramarine |
| C | 4.00 | 1,2-Propylene glycol | Propylene glycol |
| | | Care | |
| | 2.00 | D-Panthenol 50 P | Panthenol, propylene glycol |
| | 0.20 | Keltrol | Xanthan gum |
| | 0.50 | Simulgel 600 | Acrylamide/sodium acryloyl- |
| | | | dimethyltaurate copolymer, |
| | | | isohexadecane, polysorbate 80 |
| | 0.5% | P18 | |
| | 65.27 | Water dem. | Aqua dem. |
| | q.s. | Preservative | |
| | 0.50 | Vitamin E acetate | Tocopheryl acetate |

(94)

| | | | |
|---|---|---|---|
| A | 6.00 | Gilugel SIL 5 | Cyclomethicone (and) aluminum/ |
| | | | magnesium hydroxide stearate |
| | 5.00 | Uvinul N 539 T | Octocrylene |
| | 2.00 | Mexoryl XL | Drometrizole trisiloxane |
| | 1.00 | Uvinul T 150 | Ethylhexyltriazone |
| | 3.00 | T-Lite SF-S | Titanium dioxide, silicon hydrate, |
| | | | aluminum hydrate, methicone/ |
| | | | dimethicone copolymer |
| | 5.00 | Finsolv TN | C₁₂₋₁₅-Alkyl benzoate |
| | 4.00 | Abil WE 09 | Polyglyceryl-4 isostearate, cetyl-PEG-/ |
| | | | PPG-10-/1-dimethicone, hexyl laurate |
| | 2.00 | Cosmacol EMI | Di-C₁₂₋₁₃-alkyl malate |
| | 3.00 | Isopropyl | Isopropyl palmitate |
| | | palmitate | |
| | 5.00 | Abil B 8839 | Cyclopentasiloxane, cyclohexasiloxane |
| | 0.50 | Abil 350 | Dimethicone |
| B | 0.50 | Sodium chloride | Sodium chloride |
| | 0.20 | Edeta BD | Disodium EDTA |
| | 1.0% | P18 | |
| | 61.30 | Water dem. | Aqua dem. |
| C | 1.00 | Vitamin E acetate | Tocopheryl acetate |
| | 0.50 | Phenonip | |

(95)

| | | | |
|---|---|---|---|
| A | 1.00 | Abil Care 85 | Bis-PEG-/PPG-16-/16-PEG-/ |
| | | | PPG-16-/16-dimethicone, caprylic/ |
| | | | capric triglyceride |
| | 3.00 | Cremophor CO 40 | PEG-40 hydrogenated castor oil |
| | 0.30 | Cremophor WO 7 | PEG-7 hydrogenated castor oil |
| | 5.00 | Uvinul N 539 T | Octocrylene |
| | 10.00 | Witconol APM | PPG-3 myristyl ether |
| | 2.00 | Uvinul T 150 | Ethylhexyltriazone |
| | 1.00 | Dow Corning 345 | Cyclopentasiloxane, |
| | | Fluid | cyclohexasiloxane |
| | 2.00 | Uvinul A Plus | Diethylaminohydroxybenzoylhexyl |
| | | | benzoate |
| B | 5.00 | Z-COTE MAX | Zinc oxide (and) diphenylcaprylsilane |
| C | 5.00 | 1,2-Propylene | Propylene glycol |
| | | glycol | |
| | 0.20 | Keltrol | Xanthan gum |
| | 0.10 | Edeta BD | Disodium EDTA |
| | 1.0% | P18 | |
| | 1.50 | Simulgel 600 | Acrylamide/sodium acryloyldimethyl- |
| | | | taurate copolymer, isohexadecane, |
| | | | polysorbate 80 |
| | 59.40 | Water dem. | Aqua dem. |
| D | q.s. | Perfume oil | |
| | 0.50 | Glydant | DMDM hydantoin |

(96)

| | | | |
|---|---|---|---|
| A | 7.00 | Uvinul A Plus B | Ethylhexyl methoxycinnamate, |
| | | | diethylaminohydroxybenzoylhexyl |
| | | | benzoate |
| | 1.00 | Tinosorb S | Bisethylhexyloxyphenol |
| | | | methoxyphenyltriazine |
| | 1.00 | Uvinul T 150 | Ethylhexyltriazone |
| | 7.00 | Uvinul N 539 T | Octocrylene |
| | 4.00 | Eumulgin VL 75 | Lauryl glucoside, polyglyceryl-2 |
| | | | dipolyhydroxystearate, glycerol |
| | 8.00 | Cetiol B | Dibutyl adipate |
| | 8.00 | Finsolv TN | C₁₂₋₁₅-Alkyl benzoate |
| | 12.00 | Myritol 331 | Cocoglycerides |
| | 1.00 | Lanette E | Sodium cetearyl sulfate |
| | 2.00 | Lanette O | Cetearyl alcohol |
| B | 5.00 | Z-COTE MAX | Zinc oxide (and) diphenylcapryl- |
| | | | methicone |
| C | 35.35 | Water dem. | Aqua dem. |
| | 3.00 | Glycerol 87% | Glycerol |
| | 0.05 | Edeta BD | Disodium EDTA |
| | 0.20 | Allantoin | Allantoin |
| | 0.30 | Keltrol | Xanthan gum |
| | 0.1% | P18 | |
| | 1.50 | Veegum Ultra | Magnesium aluminum silicate |
| D | 0.50 | Phenonip | |
| | 1.00 | Vitamin E acetate | Tocopheryl acetate |

(97)

| | | | |
|---|---|---|---|
| A | 7.00 | Uvinul A Plus B | Ethylhexyl methoxycinnamate, |
| | | | diethylaminohydroxybenzoylhexyl |
| | | | benzoate |
| | 1.00 | Tinosorb S | Bisethylhexyloxyphenol |
| | | | methoxyphenyltriazine |
| | 1.00 | Uvinul T 150 | Ethylhexyltriazone |
| | 7.00 | Uvinul N 539 T | Octocrylene |
| | 4.00 | Eumulgin VL 75 | Lauryl glucoside, polyglyceryl-2 |
| | | | dipolyhydroxystearate, glycerol |
| | 8.00 | Cetiol B | Dibutyl adipate |
| | 8.00 | Finsolv TN | C₁₂₋₁₅-Alkyl benzoate |
| | 12.00 | Myritol 331 | Cocoglycerides |
| | 1.00 | Lanette E | Sodium cetearyl sulfate |
| | 2.00 | Lanette O | Cetearyl alcohol |
| B | 5.00 | T-Lite SF | Titanium dioxide, aluminum hydrate, |
| | | | dimethicone/methicone copolymer |
| C | 30.45 | Water dem. | Aqua dem. |
| | 3.00 | Glycerol 87% | Glycerol |
| | 0.05 | Edeta BD | Disodium EDTA |
| | 0.20 | Allantoin | Allantoin |
| | 0.30 | Keltrol | Xanthan gum |
| | 5.0% | P18 | |
| | 1.50 | Veegum Ultra | Magnesium aluminum silicate |
| D | 0.50 | Phenonip | |
| | 1.00 | Vitamin E acetate | Tocopheryl acetate |

(98)

| | | |
|---|---|---|
| 5.00 | Z-COTE MAX | Zinc oxide (and) diphenylcapryl- |
| | | methicone |
| 2.00 | Uvinul A Plus | Diethylaminohydroxybenzoylhexyl |
| | | benzoate |
| 2.00 | Mexoryl XL | Drometrizole trisiloxane |
| 3.00 | Uvinul MC 80 | Ethylhexyl methoxycinnamate |
| 0.50 | Abil 350 | Dimethicone |
| 2.75 | Carnico wax LT 20 | Carnauba (Copernica cerifera) wax, |
| | | paraffin |
| 3.70 | Candelilla wax | Candelilla (Euphorbia cerifera) wax |
| | LT 281 LJ | |
| 1.80 | Beeswax 3050 PH | Beeswax |
| 3.20 | TeCero-wax 30445 | Microcrystalline wax |
| 3.20 | TeCero-wax 1030 K | Microcrystalline wax |
| 1.34 | Cutina CP | Cetyl palmitate |
| 6.40 | Vaseline | Petrolatum |
| 7.30 | Softisan 100 | Hydrogenated cocoglycerides |
| 10.00 | Luvitol EHO | Cetearyl ethylhexanoate |
| 0.17 | Bisabolol nat. | Bisabolol |
| 1.84 | Vitamin E acetate | Tocopheryl acetate |
| 1.0% | P18 | |
| 0.42 | D,L-Alpha-tocopherol | Tocopherol |
| 40.38 | Castor oil | Castor (Ricinus communis) oil |

(99)

| | | | |
|---|---|---|---|
| A | 1.00 | Abil Care 85 | Bis-PEG-/PPG-16-/16-PEG-/ |
| | | | PPG-16-/16-dimethicone, caprylic/ |
| | | | capric triglyceride |
| | 3.00 | Cremophor CO 40 | PEG-40 hydrogenated castor oil |
| | 0.30 | Cremophor WO 7 | PEG-7 hydrogenated castor oil |
| | 2.00 | Mexoryl XL | Drometrizole trisiloxane |
| | 10.00 | Witconol APM | PPG-3 myristyl ether |
| | 1.00 | Uvinul T 150 | Ethylhexyltriazone |
| | 1.00 | Dow Corning 345 | Cyclopentasiloxane, |
| | | Fluid | cyclohexasiloxane |
| | 5.00 | Uvinul N 539 T | Octocrylene |
| B | 3.00 | T-Lite SF-S | Titanium dioxide, silicon hydrate, |
| | | | aluminum hydrate, methicone/ |
| | | | dimethicone copolymer |
| C | 5.00 | 1,2-Propylene | Propylene glycol |
| | | glycol | |
| | 1.00 | Mexoryl SX | Terephthalidenedicamphorsulfonic |
| | | | acid |
| | 0.20 | Keltrol | Xanthan gum |
| | 0.10 | Edeta BD | Disodium EDTA |
| | 1.0% | P18 | |
| | 1.50 | Simulgel 600 | Acrylamide/sodium acryloyldimethyl- |
| | | | taurate copolymer, isohexadecane, |
| | | | polysorbate 80 |
| | 69.50 | Water dem. | Aqua dem. |
| D | q.s. | Perfume oil | |
| | 0.50 | Glydant | DMDM hydantoin |

(100)

| | | | |
|---|---|---|---|
| A | 1.00 | Abil Care 85 | Bis-PEG-/PPG-16-/16-PEG-/ |
| | | | PPG-16-/16-dimethicone, caprylic/ |
| | | | capric triglyceride |
| | 3.00 | Cremophor CO 40 | PEG-40 hydrogenated castor oil |
| | 0.30 | Cremophor WO 7 | PEG-7 hydrogenated castor oil |
| | 2.00 | Parsol 1789 | Butylmethoxydibenzoylmethane |
| | 2.00 | Mexoryl XL | Drometrizole trisiloxane |
| | 10.00 | Witconol APM | PPG-3 myristyl ether |
| | 1.00 | Uvinul T 150 | Ethylhexyltriazone |
| | 1.00 | Dow Corning 345 | Cyclopentasiloxane, |
| | | Fluid | cyclohexasiloxane |
| | 5.00 | Uvinul N 539 T | Octocrylene |
| B | 3.00 | T-Lite SF-S | Titanium dioxide, silicon hydrate, |
| | | | aluminum hydrate, methicone/ |
| | | | dimethicone copolymer |
| C | 5.00 | 1,2-Propylene | Propylene glycol |
| | | glycol | |
| | 1.00 | Mexoryl SX | Terephthalidenedicamphorsulfonic |
| | | | acid |
| | 0.20 | Keltrol | Xanthan gum |
| | 0.10 | Edeta BD | Disodium EDTA |
| | 0.2% | P18 | |
| | 1.50 | Simulgel 600 | Acrylamide/sodium acryloyldimethyl- |
| | | | taurate copolymer, isohexadecane, |
| | | | polysorbate 80 |
| | 68.30 | Water dem. | Aqua dem. |
| D | q.s. | Perfume oil | |
| | 0.50 | Glydant | DMDM hydantoin |

(101)

| | | | |
|---|---|---|---|
| A | 0.70 | Cremophor A 25 | Ceteareth-25 |
| | 1.70 | Cremophor A 6 | Ceteareth-6, stearyl alcohol |
| | 2.00 | Parsol 1789 | Butylmethoxydibenzoylmethane |
| | 5.00 | Uvinul N 539 T | Octocrylene |
| | 4.00 | Z-COTE MAX | Zinc oxide (and) |
| | | | diphenylcaprylmethicone |
| | 2.00 | Abil B 8843 | PEG-14 dimethicone |
| | 3.60 | Lanette O | Cetearyl alcohol |
| | 1.00 | Uvinul T150 | Ethylhexyltriazone |
| | 2.00 | Cetiol B | Dibutyl adipate |
| B | 4.00 | Glycerol 87% | Glycerol |
| | 0.20 | Edeta BD | Disodium EDTA |
| | 71.00 | Water dem. | Panthenol |
| C | 4.00 | Luvigel EM | Caprylic/capric triglyceride, sodium |
| | | | acrylate copolymer |
| | 1.0% | P18 | |
| D | 1.00 | Vitamin E acetate | Tocopheryl acetate |
| | 0.20 | Bisabolol rac. | Bisabolol |
| | q.s. | Preservative | |

### Example 39

### Use of P18 in a Hair Tonic

### AI 5%:

| | % | Ingredient (INCI) |
|---|---|---|
| A | q.s. | Perfume oil |
| | 1.00 | PEG-40 Hydrogenated Castor Oil |
| B | 65.0 | Alcohol |
| | 1.0 | Panthenol |
| | 0.5 | Polyquarternium-16 |
| | 0.1 | Menthol |
| | 27.4 | Aqua dem. |
| | 5.00 | Aqueous solution with about 7% P18 |

[0380] Preparation: Mix phase A. Add phase B and stir until everything has dissolved. Adjust pH to pH 7.0.

### Example 40

### Use of P18 in a Hair Gel

### AI 5%:

| | % | Ingredient (INCI) |
|---|---|---|
| A | 45.00 | Carbopol 940 1% in water |
| | 0.70 | Aminomethyl Propanol |
| B | 7.50 | VP/Methacrylamide/Vinyl Imidazole Copolymer |
| | 0.10 | Perfume oil |
| | 0.30 | PEG-40 Hydrogenated Castor Oil |
| | 0.30 | Preservative |
| | 0.05 | Disodium EDTA |
| | 0.30 | Panthenol |
| | 8.00 | Alcohol |
| | 5.00 | Aqueous solution with about 7% P18 |
| | 32.75 | Aqua dem. |

[0382] Preparation: Weigh in the components of phase A and homogenize. Dissolve phase B and stir into phase A. Adjust pH to pH 6.9.

### 3. Test Examples B

### Example 41

### Long-Term Stability of P18 Tested on Malassezia furfur

[0383] Since storage over longer time periods may be necessary, in the following a 1 mM P18 peptide solution (P18 sequence H-KWKLFKKIPKFLHLAKKF-NH₂) was stored for 12 weeks at 37° C. and the antifungal activity of the stored solution on Malassezia furfur was compared to the activity of a freshly prepared 1 mM P18 peptide solution. This was done through a growth test, which was carried out as follows:

[0384] Growth medium: M472-Pityrosporum medium according to DSMZ

40 g/L malt extract
20 g/L ox bile

### 10 g/L Tween 40

[0385] The components were sterilized at 121° C., 1 bar superatmospheric pressure for 20 minutes.

[0386] 2 g/L of olive oil (sterilized by filtration and, after autoclaving, added to the other components)

[0387] Since it was a two-phase medium, the complete medium was treated with sonication in order to enlarge the phase boundary.

[0388] For agar plates, if appropriate, 150 g/L of agar agar were added to the medium.

[0389] The growth test was carried out as follows: A shake flask with M472-Pityrosporum medium was inoculated with M. furfur and incubated with shaking overnight at 30° C. and 200 rpm.

[0390] A 96-well microtiter plate was filled with in each case 100 μl of M472-Pityrosporum medium and inoculated with M. furfur suspension of the overnight culture. The M. furfur suspension was adjusted at the start of the experiment to an optical density, measured at 600 nm, of 0.02. The concentrates of the inhibitor solutions were 1 mM in water.

[0391] The growth of the following batches was compared:

[0392] M. furfur suspension without the addition of an inhibitor.

[0393] M. furfur suspension and addition of a fresh aqueous P18 solution with a final concentration of 50 μM.

[0394] M. furfur suspension and addition of a fresh aqueous P18 solution with a final concentration of 25 μM.

[0395] M. furfur suspension and addition of a P18 solution that had been stored at 37° C. for 12 weeks, with a final concentration of 50 μM.

[0396] M. furfur suspension and addition of a P18 solution that had been stored at 37° C. for 12 weeks, with a final concentration of 25 μM.

[0397] The microtiter plate was incubated with shaking at 30° C.

[0398] The growth was observed over 24 hours by measuring the optical density. The colony-forming units (CFU) were then determined by plating out 1 μl and 5 μl from each of the suspensions and, after incubation for 6 days, counting the colonies. The CFU was determined in order to exclude an influence of the two-phase medium and also the growth form of M. furfur on the optical density. The experiments were carried out at least in triple determinations.

TABLE 7
Counting the colony-forming units (the values given
are mean values with standard deviation)

| | | addition | addition | addition | addition |
|---|---|---|---|---|---|
| | | of | of stored | of | of stored |
| | | aqueous | aqueous | aqueous | aqueous |
| | | P18 | P18 | P18 | P18 |
| | | solution | solution | solution | solution |
| Incubation | | [50 μM | [50 μM | [25 μM | [25 μM |
| time | without | final | final | final | final |
| [h] | inhib. | conc.] | conc.] | conc.] | conc.] |
| 16-18 | >1000 | 0 ± 0 | 0 ± 0 | 5 ± 8 | 6 ± 7 |
| 24 | >1000 | 1 ± 1 | 1 ± 1 | 1 ± 2 | 5 ± 5 |

[0399] The results of the growth test show that the growth of M. furfur, measured as colony forming unit, was effectively inhibited by the P18 peptide solution that had been stored for 12 weeks as well as by the fresh P18 peptide solution. This means that the storage of the P18 peptide solution has not influenced the activity of the solution and, consequently, that the solution was storable over this time period.

### Example 42

### Formulability of P18

[0400] The formulability of the peptide P18 was tested in three shampoo basic formulations. For this, in a first step the formulations with the following compositions were prepared:

TABLE 8
composition of the basic formulations

| | formulation | formulation | formulation |
|---|---|---|---|
| Trade name (INCI) | 31-1 | 31-2 | 31-3 |
| Texapon NSO (Sodium | 40% | 30% | 20% |
| Laureth Sulfate) | | | |
| Tego Betain L7 | 10% | 10% | 20% |
| (Cocamidopropyl | | | |
| Betaine) | | | |

[0401] The components were mixed and dissolved. The pH was adjusted to pH 6-7 with NaOH. In the following, two 100 mM solutions of the peptide P18 (P18 sequence H-KWKLFKKIPKFLHLAKKF-NH₂) were prepared. One solution was prepared using DMSO as solvent, the other solution was prepared using water. A corresponding volume of 100 mM peptide solution was added to each of the formulations, so that the final concentration in formulations 31-1 and 31-2 was 10 mM, the final concentration of the peptide P18 in formulation 31-3 was 5 mM. The formulations thus obtained were clear and homogenic.

### Example 43

### Effect of Shampoo Basic Formulations Containing P18 as Ingredient

[0402] The aim of the experiment was to analyze the effect of a shampoo basic formulation containing the peptide P18 as ingredient (P18 sequence H-KWKLFKKIPKFLHLAKKF-NH₂). For this, in this experiment the peptide P18 was directly added to the formulation. In a first step, formulations with the following compositions were prepared:

TABLE 9
Composition of the shampoo basic formulation and the shampoo
basic formulation containing P18 as ingredient.

| | shampoo | shampoo basic |
|---|---|---|
| | basic | formulation |
| | formulation | 31-3 containing |
| Trade name (INCI) | 31-3 | P18 as ingredient |
| Texapon NSO (Sodium Laureth Sulfate) | 20% | 20% |
| Tego Betain L7 (Cocamidopropyl | 20% | 20% |
| Betaine) | | |
| peptide P18 | — | 5 mM (~1%) |
| (H-KWKLFKKIPKFLHLAKKF-NH₂) | | |

[0403] The components Texapon NSO and Tego Betain L7 were mixed and dissolved. The pH was adjusted to pH 6-7 with NaOH. In the following, a 100 mM aqueous solution of the peptide P18 (P18 sequence H-KWKLFKKIPKFLHLAKKF-NH₂) was prepared. A corresponding volume of the 100 mM P18 peptide solution was added to the formulation, so that the final concentration of the peptide P18 in formulation 31-3 was 5 mM. As described above, the formulation thus obtained was clear and homogenic. The effectiveness of the formulations against the fungus Malassezia furfur was then compared to the shampoo basic formulation containing no peptide P18.

[0404] In summary, the test was carried out as follows:

[0405] Growth medium: M472-Pityrosporum medium according to DSMZ

40 g/L malt extract
20 g/L ox bile

### 10 g/L Tween 40

[0406] The components were sterilized at 121° C., 1 bar superatmospheric pressure for 20 minutes.

[0407] 2 g/L of olive oil (sterilized by filtration and, after autoclaving, added to the other components)

[0408] Since it was a two-phase medium, the complete medium was treated with sonication in order to enlarge the phase boundary.

[0409] For agar plates, if appropriate, 150 g/L of agar agar were added to the medium.

[0410] The growth test was carried out as follows: A shake flask with M472-Pityrosporum medium was inoculated with M. furfur and incubated with shaking overnight at 30° C. and 200 rpm.

[0411] A 96-well microtiter plate was filled with in each case 170 μl of M472-Pityrosporum medium and inoculated with 10 μl of M. furfur suspension of the overnight culture. This corresponded to an optical density, measured at 620 nm, of 0.02-0.1. 20 μl of shampoo basic formulation and 20 μl of shampoo basic formulation 31-3 containing P18 as ingredient, respectively, were added to this mixture.

[0412] Thus, in summary, the following mixtures were compared in this experiment:

[0413] M. furfur suspension

[0414] M. furfur suspension and addition of 20 μl of shampoo basic formulation 31-3

[0415] M. furfur suspension and addition of 20 μl of shampoo basic formulation 31-3 containing P18 as ingredient.

[0416] The microtiter plate was incubated with shaking at 30° C.

[0417] After 24 hours of incubation, the colony-forming units (CFU) were determined by resuspending 1 μl of each suspension in 10 μl of medium and then plating out the obtained suspension. After incubation for 6 days, the colonies on the plate were counted. The CFU was determined in order to exclude an influence of the two-phase medium and also the growth form of M. furfur on the optical density. The experiments were carried out in at least two independent experiments, each with double determination.

TABLE 10
Counting the colony-forming units after incubation for 24 hours

| | | | M. furfur |
|---|---|---|---|
| | | | suspension and |
| | | M. furfur | addition of |
| | | suspension and | shampoo basic |
| | | addition of | formulation 31-3 |
| | M. furfur | shampoo basic | containing P18 as |
| | suspension | formulation 31-3 | ingredient |
| 24 h | >2000 | 300 ± 199 | 0 ± 0 |

[0418] The results show that shampoo basic formulation 31-3 per se already has a measurable growth inhibiting effect against Malassezia furfur. However, with shampoo basic formulation 31-3 containing P18 as ingredient there is no measurable growth at all. This shows that the antifungal effect of the peptide P18 is maintained in this formulation. Since no growth of M. furfur could be measured, it can actually be assumed that even lower concentrations of the ingredient P18 or comparable peptides or other comparable formulations can be used to inhibit the growth of Malassezia furfur and other Malassezia ssp.

### Example 44

### Growth Inhibition of Malassezia furfur with Equal Concentrations of the Peptide P18, Zincpyrithione, Climbazole and Ketoconazole, Based on % by Weight (%(Weight/Weight)

[0419] The molar masses of the peptide P18 (P18 peptide sequence H-KWKLFKKIPKFLHLAKKF-NH₂) and the current commercial ingredients of antidandruff shampoos inhibiting the growth of the fungus Malassezia furfur differ considerably. The peptide P18 has a molar mass of 2300 g/mol, Zincpyrithione has 317 g/mol, Ketokonazol has 531 g/mol and Climbazole has a molar mass of 292 g/mol. Since the experiments analyzing growth inhibition of M. furfur had been carried out with comparable molarities in the preceding examples, in this example growth inhibition of Malassezia furfur was analyzed using equal concentrations of the peptide P18, Zincpyrithione, Climbazole and Cetoconazol, based on % by weight (% (weigth/weight). For this, the procedure was as follows:

[0420] Growth medium: M472-Pityrosporum medium according to DSMZ

40 g/L malt extract
20 g/L ox bile

### 10 g/L Tween 40

[0421] The components were sterilized at 121° C., 1 bar superatmospheric pressure for 20 minutes.

[0422] 2 g/L of olive oil (sterilized by filtration and, after autoclaving, added to the other components)

[0423] Since it was a two-phase medium, the complete medium was treated with sonication in order to enlarge the phase boundary.

[0424] For agar plates, if appropriate, 150 g/L of agar agar were added to the medium.

[0425] The growth test was carried out as follows: A shake flask with M472-Pityrosporum medium was inoculated with M. furfur and incubated with shaking overnight at 30° C. and 200 rpm.

[0426] A 96-well microtiter plate was filled with in each case 100 μl of M472-Pityrosporum medium and inoculated with M. furfur suspension of the overnight culture. The M. furfur suspension was adjusted at the start of the experiment to an optical density, measured at 600 nm, of 0.02. The concentrates of the inhibitor solutions were 1 mM in DMSO for the peptide P18 and 10 mM in DMSO for Zincpyrithione, Ketoconazole and Climbazole. The DMSO final concentrations were maintained the same in all experiments. This means that a corresponding volume of DMSO was added to the mixture in the case of a higher concentration of Zincpyrithione, Ketoconazole or Climbazole concentrate in order to ensure comparability to the mixtures containing P18.

[0427] The growth of the following batches was compared by measuring the optical density:

[0428] M. furfur suspension and addition of P18 solution with a final concentration of 50 μM (equal to 0.0115% (w/w))

[0429] M furfur suspension and addition of Zincpyrithione (ZPT) solution with a final concentration of 362 μM (comparison to the mixture containing 50 μM of the peptide P18)

[0430] M furfur suspension and addition of Ketoconazole solution with a final concentration of 216 μM (comparison to the mixture containing 50 μM of the peptide P18)

[0431] M furfur suspension and addition of Climbazole solution with a final concentration of 390 μM (comparison to the mixture containing 50 μM of the peptide P18)

[0432] The microtiter plate was incubated with shaking at 30° C.

[0433] After 24 hours of incubation, the colony-forming units (CFU) were determined by plating out 10 μl of medium from each of the suspensions on agar plates. After incubation for 6 days, the colonies on the plates were counted. The CFU was determined in order to exclude an influence of the two-phase medium and also the growth form of M. furfur on the optical density. The experiments were carried out in at least two independent experiments, each with double determination.

TABLE 11
Counting the colony-forming units (the values given are mean values
from the experiments with standard deviation)

| | addition of | | | |
|---|---|---|---|---|
| | P18 | addition of | addition of | addition of |
| | peptide | Zincpyrithione | Climbazole | Ketoconazole |
| Incubation | solution | solution | solution | solution |
| time | [50 μM final | [362 μM | [390 μM | [216 μM final |
| [h] | conc.] | final conc.] | final conc.] | conc.] |
| 24 | 1 ± 1 | 60 ± 40 | 137 ± 33 | 84 ± 76 |
| 40 | 0 ± 0 | 26 ± 7 | 35 ± 15 | 9 ± 5 |

[0434] It was observed that within the experimental period the addition of the peptide P18 reduced the CFU and, consequently, the growth of Malassezia furfur more effectively than the reference substances Zincpyrithione, Climbazole and Ketoconazole.

[0435] These results show effective, at least comparable growth inhibition of Malassezia furfur by the peptide P18 compared to Zincpyrithione, Climbazole and Ketoconazole with equal concentrations, based on % by weight (% (w/w)).

### Example 45

### Incubation Times with the Peptide P18 from 5 Minutes to 1 Hour

[0436] Since growth inhibition of M. furfur by the peptide P18 (P18 peptide sequence H-KWKLFKKIPKFLHLAKKF-NH₂) had so far only been analyzed over incubation times of more than one hour, now the effect of the peptide P18 within the first minutes of incubation (5 minutes, 10 minutes and 20 minutes) up to the first hour after adding to the M. furfur overnight culture was tested and compared to the reference substance Zincpyrithione (Sigma Aldrich). For this, the peptide P18 and the reference substance Zincpyrithione were used in concentrations of 100 μM, 200 μM and 500 μM. The experiments were carried out as follows:

[0437] Growth medium: M472-Pityrosporum medium according to DSMZ

40 g/L malt extract
20 g/L ox bile

### 10 g/L Tween 40

[0438] The components were sterilized at 121° C., 1 bar superatmospheric pressure for 20 minutes.

[0439] 2 g/L of olive oil (sterilized by filtration and, after autoclaving, added to the other components)

[0440] Since it was a two-phase medium, the complete medium was treated with sonication in order to enlarge the phase boundary.

[0441] For agar plates, if appropriate, 150 g/L of agar agar were added to the medium.

[0442] The growth test was carried out as follows: A shake flask with M472-Pityrosporum medium was inoculated with M. furfur and incubated with shaking overnight at 30° C. and 200 rpm.

[0443] A 96-well microtiter plate was filled with in each case 100 μl of M472-Pityrosporum medium and inoculated with M. furfur suspension of the overnight culture. The M. furfur suspension was adjusted at the start of the experiment to an optical density, measured at 600 nm, of 0.1.

[0444] The growth of the following batches was compared:

[0445] M. furfur suspension and addition of the peptide P18 with a final concentration of 100 μM, plating out after 5 minutes, 10 minutes, 20 minutes and 60 minutes

[0446] M. furfur suspension and addition of the peptide P18 with a final concentration of 200 μM plating out after 5 minutes, 10 minutes, 20 minutes and 60 minutes

[0447] M. furfur suspension and addition of the peptide P18 with a final concentration of 500 μM plating out after 5 minutes, 10 minutes, 20 minutes and 60 minutes

[0448] M. furfur suspension and addition of Zincpyrithione with a final concentration of 100 μM plating out after 5 minutes, 10 minutes, 20 minutes and 60 minutes

[0449] M. furfur suspension and addition of Zincpyrithione with a final concentration of 200 μM plating out after 5 minutes, 10 minutes, 20 minutes and 60 minutes

[0450] M. furfur suspension and addition of Zincpyrithione with a final concentration of 500 μM plating out after 5 minutes, 10 minutes, 20 minutes and 60 minutes

[0451] The microtiter plate was incubated with shaking at 30° C.

[0452] After the incubation times indicated above, the colony-forming units (CFU) were determined by plating out 50 μl from each of the suspensions and, after incubation for 6 days, counting the colonies. The CFU was determined in order to exclude an influence of the two-phase medium and also the growth form of M. furfur on the optical density. The experiments were independently repeated. Below, those colony-forming units are indicated which showed less than 1000 colonies and thus a significant growth inhibition.

TABLE 12
Counting the colony-forming units after the indicated incubation time

| | | colony-forming units after | | | |
|---|---|---|---|---|---|
| | final concentration | the indicated incubation time | | | |
| | in the experiment | 5 | 10 | 20 | 60 |
| Substance | [μM] | minutes | minutes | minutes | minutes |
| P18 | 100 | >1000 | >1000 | 604 | 149 ± 60 |
| | 200 | >1000 | >1000 | >1000 | 52 ± 16 |
| | 500 | >1000 | 398 ± 290 | 26 ± 6 | 1 ± 1 |
| ZPT | 100 | >1000 | >1000 | >1000 | >1000 |
| (Zincpyrithione) | 200 | >1000 | >1000 | >1000 | >1000 |
| | 500 | >1000 | >1000 | >1000 | >1000 |

[0453] The results show that after the first 10 minutes of incubation with the peptide P18 the number of living Malassezia furfur cells was already considerably reduced as compared to incubation with Zincpyrithione. After 60 minutes of incubation with even lower peptide P18 concentrations the colony-forming units were considerably reduced as compared to shorter incubation times. This means that the mechanism of action of the peptide P18 clearly differs from the mechanism of action of Zincpyrithione and that the peptide P18 is effective against M. furfur even after short incubation times.

### Example 46

### Effect of P18 Variants

[0454] The inhibitory effect of the following P18 variants against M. furfur was analyzed:

| | |
|---|---|
| H-KWKLFKKIPKFLHLAKKF-NH₂ | (P18; carboxy-terminal end amidated) |
| H-KWKLFKKIPKFLHLAKKF-OH | (P18-OH; carboxy-terminal end not modified) |
| H-PKWKLFKKIPKFLHLAKKFD-OH | (P18AC-OH; carboxy-terminal end not modified) |
| H-PKWKLFKKIPKFLHLAKKFN-NH₂ | (P18AC-NH₂; carboxy-terminal end amidated) |

[0455] The experiments were carried out as follows:

[0456] Growth medium: M472-Pityrosporum medium according to DSMZ

40 g/L malt extract
20 g/L ox bile

### 10 g/L Tween 40

[0457] The components were sterilized at 121° C., 1 bar superatmospheric pressure for 20 minutes.

[0458] 2 g/L of olive oil (sterilized by filtration and, after autoclaving, added to the other components)

[0459] Since it was a two-phase medium, the complete medium was treated with sonication in order to enlarge the phase boundary.

[0460] For agar plates, if appropriate, 150 g/L of agar agar were added to the medium.

[0461] The growth test was carried out as follows: A shake flask with M472-Pityrosporum medium was inoculated with M. furfur and incubated with shaking overnight at 30° C. and 200 rpm.

[0462] A 96-well microtiter plate was filled with in each case 100 μl of M472-Pityrosporum medium and inoculated with M. furfur suspension of the overnight culture. The M. furfur suspension was adjusted at the start of the experiment to an optical density, measured at 600 nm, of 0.1.

[0463] The peptide variants were dissolved in Dimethylsulfoxide (DMSO) with a final concentration of 1 mM. Optionally, DMSO can be omitted and a pure aqueous peptide solution can be used instead. 5 μl of said solution were added to 100 μl of M. furfur suspension (peptide P18 having a final concentration of 50 μM). In a reference mixture the same amount of DMSO containing no peptide P18 was added.

[0464] The microtiter plate was incubated with shaking at 30° C.

[0465] After 24 hours, the colony-forming units (CFU were determined by plating out 10 μl from each of the suspensions and, after incubation for 6 days, counting the colonies. Two independent experiments with in each case three identical mixtures were carried out and the number of colony-forming units was averaged.

TABLE 13
Averaged number of colony-forming units (CFU) after incubation of
M. furfur with 50 μM of different P18 variants

| mixtures | CFU |
|---|---|
| M. furfur suspension without additives | 1377 |
| suspension + DMSO | 150 |
| suspension + DMSO + P18 | 0 |
| suspension + DMSO + P18-OH | 3 |
| suspension + DMSO + P18AC-OH | 37 |

[0466] The experiment shows that the solvent DMSO per se already reduces the CFU. However, all P18 variants show an increased inhibitory effect against M. furfur as compared to DMSO, with effectiveness increasing in the order P18AC-OH; P18-OH; P18. Following the same order, the number of negatively charged carboxylic groups decreases in the peptide molecule. It can therefore be concluded that peptide variants carrying a weak negative charge are most effective.

### Example 47

### Kinetics of the Effect of the Peptide P18 on M. furfur in the Presence of a Shampoo Basic Formulation

[0467] The effect of the peptide P18 (H-KWKLFKKIPKFLHLAKKF-NH₂; carboxy-terminal end amidated) as compared to Zincpyrithione and Climbazole was tested in the presence of the shampoo basic formulation and at different incubation times (table 14). The experiments were carried out as follows:

[0468] The following shampoo basic formulation was prepared:

TABLE 14
composition of the shampoo basic formulation

| | Shampoo basic |
|---|---|
| Trade name (INCI) | fomulation 31-3 |
| Texapon NSO (Sodium Laureth | 20% |
| Sulfate) | |
| Tego Betain L7 | 20% |
| (Cocamidopropyl | |
| Betaine) | |

[0469] The components Texapon NSO and Tego Betain L7 were mixed and dissolved. The pH was adjusted to pH 6-7 with NaOH.

[0470] The effect of P18, ZPT and Climbazole against M. furfur was analyzed as follows:

[0471] Growth medium: M472-Pityrosporum medium according to DSMZ

40 g/L malt extract
20 g/L ox bile

### 10 g/L Tween 40

[0472] The components were sterilized at 121° C., 1 bar superatmospheric pressure for 20 minutes.

[0473] 2 g/L of olive oil (sterilized by filtration and, after autoclaving, added to the other components)

[0474] Since it was a two-phase medium, the complete medium was treated with sonication in order to enlarge the phase boundary.

[0475] For agar plates, if appropriate, 150 g/L of agar agar were added to the medium.

[0476] The growth test was carried out as follows: A shake flask with M472-Pityrosporum medium was inoculated with M. furfur and incubated with shaking overnight at 30° C. and 200 rpm.

[0477] A 96-well microtiter plate was filled with in each case 100 μl of M472-Pityrosporum medium and inoculated with M. furfur suspension of the overnight culture. The M. furfur suspension was adjusted at the start of the experiment to an optical density, measured at 600 nm, of 0.1.10% (v/v) of shampoo basic formulation 31-3 were added to the M. furfur suspension (see table 14).

[0478] The peptide P18 was dissolved in water with a concentration of 230 g/l. The active ingredients Zincpyrithione and Climbazole were dissolved in DMSO with a concentration of 230 g/l, with the active ingredients partially remaining insolubly suspended. The peptide solution and the active ingredient solutions, respectively, were added to the M. furfur suspension containing shampoo basic formulation, with a final concentration of 2.3 g/l; 1.15 g/l; 0.46 g/l and 0.23 g/l.

[0479] The microtiter plate was incubated with shaking at 30° C.

[0480] After incubation of the mixtures for 5 min; 10 min; 20 min; 60 min and 24 hours, the colony-forming units were determined by plating out 1 μl from each of the suspensions and, after incubation for 6 days, counting the colonies.

[0481] It was observed that in this test P18 shows superior characteristics as compared to Zincpyrithione or Climbazole.

### Example 48

### Long-Term Stability of the Peptide P18 in Shampoo Basic Formulations Tested on M. furfur

[0482] Long-term stability of the peptide P18 (H-KWKLFKKIPKFLHLAKKF-NH₂; carboxy-terminal end amidated) in shampoo basic formulations was tested.

[0483] The following shampoo basic formulations were prepared:

TABLE 15
Composition of the formulations

| | formulation | formulation | formulation |
|---|---|---|---|
| Trade name (INCI) | 31-1-10 | 31-3-5 | 31-3-2 |
| Texapon NSO (Sodium | 40% | 20% | 20% |
| Laureth Sulfate) | | | |
| Tego Betain L7 | 10% | 20% | 20% |
| (Cocamidopropyl | | | |
| Betaine) | | | |
| peptide P18 | 10 mM | 5 mM | 2 mM |

[0484] The components Texapon NSO and Tego Betain L7 were mixed and dissolved. The pH was adjusted to pH 6-7 with NaOH. In the following, 100 mM of aqueous P18 peptide solution were prepared. A corresponding volume of 100 mM P18 peptide solution was added to each formulation in order to obtain peptide P18 final concentrations as indicated in table 15.

[0485] The formulations were stored at 40° C.

[0486] After 0; 12 and 22 days, the effect of the formulations against M. furfur was analyzed.

[0487] Growth medium: M472-Pityrosporum medium according to DSMZ

40 g/L malt extract
20 g/L ox bile

### 10 g/L Tween 40

[0488] The components were sterilized at 121° C., 1 bar superatmospheric pressure for 20 minutes.

[0489] 2 g/L of olive oil (sterilized by filtration and, after autoclaving, added to the other components)

[0490] Since it was a two-phase medium, the complete medium was treated with sonication in order to enlarge the phase boundary.

[0491] For agar plates, if appropriate, 150 g/L of agar agar were added to the medium.

[0492] The growth test was carried out as follows: A shake flask with M472-Pityrosporum medium was inoculated with M. furfur and incubated with shaking overnight at 30° C. and 200 rpm.

[0493] A 96-well microtiter plate was filled with in each case 100 μl of M472-Pityrosporum medium and inoculated with M. furfur suspension of the overnight culture. The M. furfur suspension was adjusted at the start of the experiment to an optical density, measured at 600 nm, of 0.1.

[0494] 10% (v/v) of the stored formulations 31-1-10; 31-3-5; 31-3-2 (table 15) were added to the M. furfur suspension.

[0495] The microtiter plate was incubated with shaking at 30° C.

[0496] After 24 hours, the colony-forming units (CFU) were determined. For this, 1 μl and 10 μl were plated out from each of the suspensions and, after incubation for 6 days, the colonies were counted.

[0497] It was observed that P18 shows stable characteristics at the tested conditions.

### Example 49

### Determining the Minimum Inhibitory Concentration (MIC) of P18 Peptide in the Presence of a Shampoo Basic Formulation

[0498] The minimum inhibitory concentration (MIC) of the peptide P18 (H-KWKLFKKIPKFLHLAKKF-NH₂; carboxy-terminal end amidated) in the presence of the shampoo basic formulation 31-3 (table 16) was tested as follows:

[0499] The following shampoo basic formulation was prepared:

TABLE 16
composition of the shampoo basic formulation

| | shampoo basic |
|---|---|
| | formulation 31-3 |
| | containing P18 as |
| Trade name (INCI) | ingredient |
| Texapon NSO (Sodium Laureth | 20% |
| Sulfate) | |
| Tego Betain L7 | 20% |
| (Cocamidopropyl | |
| Betaine) | |

[0500] The shampoo basic formulation was prepared by mixing and dissolving the components Texapon NSO and Tego Betain L7. The pH was adjusted to pH 6-7 with NaOH.

[0501] The effect of the peptide against M. furfur was analyzed as follows:

[0502] Growth medium: M472-Pityrosporum medium according to DSMZ

40 g/L malt extract
20 g/L ox bile

### 10 g/L Tween 40

[0503] The components were sterilized at 121° C., 1 bar superatmospheric pressure for 20 minutes.

[0504] 2 g/L of olive oil (sterilized by filtration and, after autoclaving, added to the other components)

[0505] Since it was a two-phase medium, the complete medium was treated with sonication in order to enlarge the phase boundary.

[0506] For agar plates, if appropriate, 150 g/L of agar agar were added to the medium.

[0507] The growth test was carried out as follows: A shake flask with M472-Pityrosporum medium was inoculated with M. furfur and incubated with shaking overnight at 30° C. and 200 rpm.

[0508] A 96-well microtiter plate was filled with in each case 170 μl of M472-Pityrosporum medium and inoculated with 10 μl of M. furfur suspension of the overnight culture. This corresponded to an optical density of 0.02-0.1, measured at 620 nm. 20 μl of shampoo basic formulation 31-3 were added to this mixture. Peptide P18 was dissolved in DMSO with a concentration of 10 mM. Corresponding amounts of P18 solution were added in order to obtain final concentrations as indicated in table 17.

[0509] The microtiter plate was incubated with shaking at 30° C.

[0510] After incubation for 24 hours, the colony-forming units (CFU) were determined by resuspending 1 μl of each of the suspensions in 10 μl of medium and then plating out the obtained suspensions. After incubation for 6 days, the colonies on the plate were counted. The experiment was carried out in double determination.

TABLE 17
Counting the colony-forming units (CFU) after 24 hours of incubation

| P18 concentration | CFU |
|---|---|
| 0 μM | 538 |
| 25 μM | 80 |
| 50 μM | 32 |
| 100 μM | 0 |
| 200 μM | 0 |
| 300 μM | 0 |
| 400 μM | 0 |
| 500 μM | 0 |

[0511] The results show that growth of M. furfur is completely inhibited by P18 concentrations above 100 μM. The minimum inhibitory concentration in the presence of shampoo basic formulation 31-3 is therefore between 50 μM and 100 μM. This shows that the antifungal effect of the peptide P18 is maintained in this formulation, even though, as compared to mixtures containing no shampoo formulation (see example 41), the activity is slightly reduced by the shampoo basic formulation used.

### Example 50

### Combination of the Peptide P18 with Conventional Fungicidal Active Ingredients

[0512] The effect of combinations of active ingredients comprising proportions of the conventional fungicidal active ingredient Zincpyrithion, Ketoconazole or Climbazole and of the peptide P18 (H-KWKLFKKIPKFLHLAKKF-NH₂; carboxy-terminal end amidated) was tested in aqueous solution and in the presence of shampoo formulation 31-3 as follows:

[0513] The following shampoo basic formulation was prepared:

TABLE 18
Composition of the shampoo basic formulation:

| | shampoo basic |
|---|---|
| Trade name (INCI) | formulation 31-3 |
| Texapon NSO (Sodium | 20% |
| Laureth Sulfate) | |
| Tego Betain L7 | 20% |
| (Cocamidopropyl | |
| Betaine) | |

[0514] The shampoo basic formulation was prepared by mixing and dissolving the components Texapon NSO and Tego Betain L7. The pH was adjusted to pH 6-7 with NaOH.

[0515] The effect of the peptide P18 and of said conventional agents against M. furfur was analyzed as follows:

[0516] Growth medium: M472-Pityrosporum medium according to DSMZ

40 g/L malt extract
20 g/L ox bile

### 10 g/L Tween 40

[0517] The components were sterilized at 121° C., 1 bar superatmospheric pressure for 20 minutes.

[0518] 2 g/L of olive oil (sterilized by filtration and, after autoclaving, added to the other components)

[0519] Since it was a two-phase medium, the complete medium was treated with sonication in order to enlarge the phase boundary.

[0520] For agar plates, if appropriate, 150 g/L of agar agar were added to the medium.

[0521] The growth test was carried out as follows: A shake flask with M472-Pityrosporum medium was inoculated with M. furfur and incubated with shaking overnight at 30° C. and 200 rpm.

[0522] A 96-well microtiter plate was filled with in each case 170 μl of M472-Pityrosporum medium and inoculated with 10 μl of M. furfur suspension of the overnight culture. This corresponded to an optical density of 0.02-0.1, measured at 620 nm. 20 μl of shampoo basic formulation 31-3 or alternatively water were added to this mixture. The peptide P18 was dissolved in water with a concentration of 10 mM. The conventional fungicidal active ingredient was dissolved in DMSO with a concentration of 10 mM. Corresponding amounts of P18 solution and conventional fungicidal active ingredient solution were added to the mixtures in order to obtain final concentrations as indicated in table 19.

TABLE 19
Concentrations of conventional fungicidal active ingredients and P18

| | conventional fungicidal | | |
|---|---|---|---|
| | active ingredient | | P18 concentration |
| Mixture no. | concentration | | [μM] |
| 1 | 500 | μM Zincpyrithione | 1000 |
| 2 | 500 | μM Zincpyrithione | 200 |
| 3 | 500 | μM Zincpyrithione | 50 |
| 4 | 500 | μM Zincpyrithione | 0 |
| 5 | 100 | μM Zincpyrithione | 1000 |
| 6 | 100 | μM Zincpyrithione | 200 |
| 7 | 100 | μM Zincpyrithione | 50 |
| 8 | 100 | μM Zincpyrithione | 0 |
| 9 | 20 | μM Zincpyrithione | 1000 |
| 10 | 20 | μM Zincpyrithione | 200 |
| 11 | 20 | μM Zincpyrithione | 50 |
| 12 | 20 | μM Zincpyrithione | 0 |
| 13 | 0 | μM Zincpyrithione | 1000 |
| 14 | 0 | μM Zincpyrithione | 200 |
| 15 | 0 | μM Zincpyrithione | 50 |
| 16 | 0 | μM Zincpyrithione | 0 |
| 17 | 500 | μM Ketoconazole | 1000 |
| 18 | 500 | μM Ketoconazole | 200 |
| 19 | 500 | μM Ketoconazole | 50 |
| 20 | 500 | μM Ketoconazole | 0 |
| 21 | 100 | μM Ketoconazole | 1000 |
| 22 | 100 | μM Ketoconazole | 200 |
| 23 | 100 | μM Ketoconazole | 50 |
| 24 | 100 | μM Ketoconazole | 0 |
| 25 | 20 | μM Ketoconazole | 1000 |
| 26 | 20 | μM Ketoconazole | 200 |
| 27 | 20 | μM Ketoconazole | 50 |
| 28 | 20 | μM Ketoconazole | 0 |
| 29 | 0 | μM Ketoconazole | 1000 |
| 30 | 0 | μM Ketoconazole | 200 |
| 31 | 0 | μM Ketoconazole | 50 |
| 32 | 0 | μM Ketoconazole | 0 |
| 33 | 500 | μM Climbazole | 1000 |
| 34 | 500 | μM Climbazole | 200 |
| 35 | 500 | μM Climbazole | 50 |
| 36 | 500 | μM Climbazole | 0 |
| 37 | 100 | μM Climbazole | 1000 |
| 38 | 100 | μM Climbazole | 200 |
| 39 | 100 | μM Climbazole | 50 |
| 40 | 100 | μM Climbazole | 0 |
| 41 | 20 | μM Climbazole | 1000 |
| 42 | 20 | μM Climbazole | 200 |
| 43 | 20 | μM Climbazole | 50 |
| 44 | 20 | μM Climbazole | 0 |
| 45 | 0 | μM Climbazole | 1000 |
| 46 | 0 | μM Climbazole | 200 |
| 47 | 0 | μM Climbazole | 50 |
| 48 | 0 | μM Climbazole | 0 |

[0523] The microtiter plate was incubated with shaking at 30° C.

[0524] After incubation for 24 hours, the colony-forming units (CFU) were determined by resuspending 1 μl of each of the suspensions in 10 μl of medium and then plating out the obtained suspensions. After incubation for 6 days, the colonies on the plate were counted. It turns out that combinations of P18 with conventional fungicidal active ingredients show superior characteristics as compared to conventional fungicidal active ingredients taken alone.

### 4. Formulation Examples B

[0525] Cosmetic antidandruff shampoo preparations comprising the peptide P18 are described below. The peptide P18 is specified in the examples below by way of representation of all of the other peptides described above. It will be appreciated by the person skilled in the art that all of the other specified peptides according to the invention can also be used in the preparations given below.

[0526] The peptide P18 can be the sole active ingredient contained in the preparations or it can be used in combination with other antidandruff active ingredients (see description).

### Example 51

| | | 1 | 2 | 3 | 4 |
|---|---|---|---|---|---|
| | Ingredients (INCI) | % | % | % | % |
| A | Ammonium Laureth Sulfate | 8.7 | 8.7 | 8.7 | 8.7 |
| | Ammonium Lauryl Sulfate | 7.2 | 7.2 | 7.2 | 7.2 |
| | Glycol Distearate | 1.5 | 1.5 | 1.5 | 1.5 |
| | Dimethicone | 1.2 | 1.2 | 1.2 | 1.2 |
| | Peptid P18 | 0.05 | 0.3 | 0.05 | 0.3 |
| | Zinc Pyrithione | 0 | 0 | 1 | 0.7 |
| | Ammonium Xylenesulfonate | 0.8 | 0.8 | 0.8 | 0.8 |
| | Cetyl Alcohol | 0.7 | 0.7 | 0.7 | 0.7 |
| | Cocamide MEA | 0.6 | 0.6 | 0.6 | 0.6 |
| | Hydrogenated Polydecene | 0.5 | 0.5 | 0.5 | 0.5 |
| | Polyquaternium-10 | 0.4 | 0.4 | 0.4 | 0.4 |
| | PEG-7M | 0.3 | 0.3 | 0.3 | 0.3 |
| | Panthenol | 0.3 | 0.3 | 0.3 | 0.3 |
| | Panthenyl Ethyl Ether | 0.3 | 0.3 | 0.3 | 0.3 |
| | Methyl Tyrosinate HCl | 0.2 | 0.2 | 0.2 | 0.2 |
| | Histidine | 0.15 | 0.15 | 0.15 | 0.15 |
| | Trimethylolpropane | 0.15 | 0.15 | 0.15 | 0.15 |
| | Tricaprylate/Tricaprate | | | | |
| | Lysine HCl | 0.1 | 0.1 | 0.1 | 0.1 |
| | Sodium | 0.1 | 0.1 | 0.1 | 0.1 |
| | Polynaphthalenesulfonate | | | | |
| | Tocopherol | 0.1 | 0.1 | 0.1 | 0.1 |
| | Aqua | ad 100 | ad 100 | ad 100 | ad 100 |
| | Preservative | q.s. | q.s. | q.s. | q.s. |
| | Parfum | q.s. | q.s. | q.s. | q.s. |
| | Tetrasodium EDTA | q.s. | q.s. | q.s. | q.s. |
| | Sodium Chloride | q.s. | q.s. | q.s. | q.s. |
| B | Citric Acid | q.s. | q.s. | q.s. | q.s. |
| | Sodium Citrate | q.s. | q.s. | q.s. | q.s. |

[0528] Preparation: Mix and dissolve the components of phase A. Adjust the pH to pH 5-7 with phase B. Viscosity can be adjusted through Tetrasodium EDTA and/or Sodium Chloride. Preferred viscosity is between 5000-15000 mPas.

### Example 52

| | | 1 | 2 | 3 | 4 |
|---|---|---|---|---|---|
| | Ingredients (INCI) | % | % | % | % |
| A | Sodium Laureth Sulfate | 9 | 9 | 9 | 9 |
| | Cocamidopropyl Betaine | 6 | 6 | 6 | 6 |
| | Sodium Chloride | 3 | 3 | 3 | 3 |
| | PEG-3 Distearate | 1.5 | 1.5 | 1.5 | 1.5 |
| | Propylene Glycol | 1.5 | 1.5 | 1.5 | 1.5 |
| | Zinc Pyrithione | 0 | 0 | 1 | 0.7 |
| | Piroctone Olamine | 0 | 0 | 0.8 | 0.6 |
| | Climbazolee | 0 | 0 | 0.5 | 0.3 |
| | Peptid P18 | 0.05 | 0.3 | 0.05 | 0.3 |
| | Guar | 0.2 | 0.2 | 0.2 | 0.2 |
| | Hydroxypropyltrimonium | | | | |
| | Chloride | | | | |
| | Panthenol | 0.3 | 0.3 | 0.3 | 0.3 |
| | Sodium | 0.2 | 0.2 | 0.2 | 0.2 |
| | Polynaphthalenesulfonate | | | | |
| | Glucose | 0.2 | 0.2 | 0.2 | 0.2 |
| | Tocopherol | 0.1 | 0.1 | 0.1 | 0.1 |
| | Aqua | ad 100 | ad 100 | ad 100 | ad 100 |
| | Acrylates/Beheneth-25 | q.s. | q.s. | q.s. | q.s. |
| | Methacrylate Copolymer | | | | |
| | Cellulose Gum | q.s. | q.s. | q.s. | q.s. |
| | Parfum | q.s. | q.s. | q.s. | q.s. |
| | Preservative | q.s. | q.s. | q.s. | q.s. |
| B | Sodium Citrate | q.s. | q.s. | q.s. | q.s. |
| | Lactic Acid | q.s. | q.s. | q.s. | q.s. |

[0530] Preparation: Mix and dissolve components of phase A. Adjust the pH to pH 5-7 with phase B. Viscosity can be adjusted through Cellulose Gum and/or Acrylates/Beheneth-25 Methacrylate Copolymer. Preferred viscosity is between 5000-15000 mPas.

### Example 53

| | | 1 | 2 | 3 | 4 |
|---|---|---|---|---|---|
| | Ingredients (INCI) | % | % | % | % |
| A | Sodium Laureth Sulfate | 7 | 7 | 7 | 7 |
| | Disodium Laureth | 5.5 | 5.5 | 5.5 | 5.5 |
| | Sulfosuccinate | | | | |
| | Cocamidopropyl Betaine | 3 | 3 | 3 | 3 |
| | Glycerin | 1.5 | 1.5 | 1.5 | 1.5 |
| | Zinc Pyrithione | 0 | 0 | 1 | 0.7 |
| | Zinc Sulfate | 0 | 0 | 0.7 | 0.5 |
| | Peptid P18 | 0.05 | 0.3 | 0.05 | 0.3 |
| | Sodium Chloride | 0.8 | 0.8 | 0.8 | 0.8 |
| | Dimethiconol | 0.8 | 0.8 | 0.8 | 0.8 |
| | PPG-12 | 0.8 | 0.8 | 0.8 | 0.8 |
| | Guar | 0.3 | 0.3 | 0.3 | 0.3 |
| | Hydroxypropyltrimonium | | | | |
| | Chloride | | | | |
| | TEA- | 0.4 | 0.4 | 0.4 | 0.4 |
| | Dodecylbenzenesulfonate | | | | |
| | Sodium | 0.1 | 0.1 | 0.1 | 0.1 |
| | Polynaphthalenesulfonate | | | | |
| | Ascorbyl Palmitate | 0.15 | 0.15 | 0.15 | 0.15 |
| | Tocopherol | 0.1 | 0.1 | 0.1 | 0.1 |
| | Lysine HCl | 0.15 | 0.15 | 0.15 | 0.15 |
| | Aqua | ad 100 | ad 100 | ad 100 | ad 100 |
| | Parfum | q.s. | q.s. | q.s. | q.s. |
| | Carbomer | q.s. | q.s. | q.s. | q.s. |
| | Preservative | q.s. | q.s. | q.s. | q.s. |
| B | Sodium Hydroxide | q.s. | q.s. | q.s. | q.s. |
| | Citric Acid | q.s. | q.s. | q.s. | q.s. |

[0532] Preparation: Mix and dissolve components of phase A. Adjust the pH to pH 5-7 with phase B. Viscosity can be adjusted through Carbomer and/or Sodium Hydroxide. Preferred viscosity is between 5000-15000 mPas.

### Example 54

| | | 1 | 2 | 3 | 4 |
|---|---|---|---|---|---|
| | Ingredients (INCI) | % | % | % | % |
| A | Ammonium Lauryl Sulfate | 8.1 | 8.1 | 8.1 | 8.1 |
| | Ammonium Laureth Sulfate | 5.8 | 5.8 | 5.8 | 5.8 |
| | Cocamide MEA | 4 | 4 | 4 | 4 |
| | Cocamidopropyl Betaine | 2.3 | 2.3 | 2.3 | 2.3 |
| | Dimethiconol | 1 | 1 | 1 | 1 |
| | PEG-5 Cocamide | 0.95 | 0.95 | 0.95 | 0.95 |
| | Zinc Pyrithione | 0 | 0 | 0.5 | 0.3 |
| | Peptid P18 | 0.05 | 0.3 | 0.05 | 0.3 |
| | Glycol Distearate | 0.5 | 0.5 | 0.5 | 0.5 |
| | PPG-9 | 0.7 | 0.7 | 0.7 | 0.7 |
| | Guar | 0.25 | 0.25 | 0.25 | 0.25 |
| | Hydroxypropyltrimonium | | | | |
| | Chloride | | | | |
| | TEA- | 0.3 | 0.3 | 0.3 | 0.3 |
| | Dodecylbenzenesulfonate | | | | |
| | Ammonium Chloride | 0.2 | 0.2 | 0.2 | 0.2 |
| | Ammonium Xylenesulfonate | 0.1 | 0.1 | 0.1 | 0.1 |
| | Aqua | ad 100 | ad 100 | ad 100 | ad 100 |
| | Carbomer | q.s. | q.s. | q.s. | q.s. |
| | Preservative | q.s. | q.s. | q.s. | q.s. |
| | Parfum | q.s. | q.s. | q.s. | q.s. |

[0534] Preparation: Mix and dissolve components of phase A. Adjust the pH to pH 5-7 with phase B. Viscosity can be adjusted through Carbomer. Preferred viscosity is between 5000-15000 mPas.

### Example 55

| | | 1 | 2 | 3 | 4 |
|---|---|---|---|---|---|
| | Ingredients (INCI) | % | % | % | % |
| A | Sodium Myreth Sulfate | 7.4 | 7.4 | 7.4 | 7.4 |
| | Sodium Laureth Sulfate | 6.1 | 6.1 | 6.1 | 6.1 |
| | Cocamidopropyl Betaine | 4.3 | 4.3 | 4.3 | 4.3 |
| | Disodium PEG-5 Laurylcitrate | 3.4 | 3.4 | 3.4 | 3.4 |
| | Sulfosuccinate | | | | |
| | PEG-3 Distearate | 1.5 | 1.5 | 1.5 | 1.5 |
| | PEG-40 Hydrogenated | 0.1 | 0.1 | 0.1 | 0.1 |
| | Castor Oil | | | | |
| | Tetrasodium | 0.6 | 0.6 | 0.6 | 0.6 |
| | Iminodisuccinate | | | | |
| | Peptid P18 | 0.05 | 0.3 | 0.05 | 0.3 |
| | Piroctone Olamine | 0 | 0 | 1 | 0.7 |
| | Polyquaternium-10 | 0.2 | 0.2 | 0.2 | 0.2 |
| | Sodium Chloride | 0.8 | 0.8 | 0.8 | 0.8 |
| | Panthenol | 0.4 | 0.4 | 0.4 | 0.4 |
| | Guar | 0.7 | 0.7 | 0.7 | 0.7 |
| | Hydroxypropyltrimonium | | | | |
| | Chloride | | | | |
| | Oryzanol | 0.3 | 0.3 | 0.3 | 0.3 |
| | Aqua | ad 100 | ad 100 | ad 100 | ad 100 |
| | Parfum | q.s. | q.s. | q.s. | q.s. |
| | Preservatives | q.s. | q.s. | q.s. | q.s. |
| B | Citric Acid | q.s. | q.s. | q.s. | q.s. |

[0536] Preparation: Mix and dissolve components of phase A. Adjust the pH to pH 5-7 with phase B. Preferred viscosity is between 5000-15000 mPas.

### Example 56

| | | 1 | 2 | 3 | 4 |
|---|---|---|---|---|---|
| | Ingredients (INCI) | % | % | % | % |
| A | Sodium Laureth Sulfate | 11 | 11 | 11 | 11 |
| | Cocamidopropyl Betaine | 6 | 6 | 6 | 6 |
| | PEG-3 Distearate | 2 | 2 | 2 | 2 |
| | Peptid P18 | 0.05 | 0.3 | 0.05 | 0.3 |
| | Piroctone Olamine | 0 | 0 | 1 | 0.7 |
| | Polyquaternium-10 | 0.2 | 0.2 | 0.2 | 0.2 |
| | PEG-40 Hydrogenated | 0.2 | 0.2 | 0.2 | 0.2 |
| | Castor Oil | | | | |
| | Sodium Chloride | 0.8 | 0.8 | 0.8 | 0.8 |
| | Propylene Glycol | 0.4 | 0.4 | 0.4 | 0.4 |
| | Trideceth-9 | 0.6 | 0.6 | 0.6 | 0.6 |
| | Aqua | ad 100 | ad 100 | ad 100 | ad 100 |
| | Parfum | q.s. | q.s. | q.s. | q.s. |
| | Preservatives | q.s. | q.s. | q.s. | q.s. |
| B | Citric Acid | q.s. | q.s. | q.s. | q.s. |

[0538] Preparation: Mix and dissolve components of phase A. Adjust the pH to pH 5-7 with phase B. Preferred viscosity is between 5000-15000 mPas.

### Example 57

| | | 1 | 2 | 3 | 4 |
|---|---|---|---|---|---|
| | Ingredients (INCI) | % | % | % | % |
| A | Alcohol denat. | 3 | 3 | 3 | 3 |
| | VP/VA Copolymer | 2.9 | 2.9 | 2.9 | 2.9 |
| | PEG 32 | 1.5 | 1.5 | 1.5 | 1.5 |
| | PEG-40 Hydrogenated | 0.1 | 0.1 | 0.1 | 0.1 |
| | Castor Oil | | | | |
| | Amino Methyl Propanol | 0.4 | 0.4 | 0.4 | 0.4 |
| | PEG-12 Dimethicone | 0.2 | 0.2 | 0.2 | 0.2 |
| | Panthenol | 0.3 | 0.3 | 0.3 | 0.3 |
| | Peptid P18 | 0.05 | 0.3 | 0.05 | 0.3 |
| | Piroctone Olamine | 0 | 0 | 1 | 0.7 |
| | Benzophenone-4 | 0.05 | 0.05 | 0.05 | 0.05 |
| | VP/Methacrylamide/Vinyl | 0.9 | 0.9 | 0.9 | 0.9 |
| | Imidazole Copolymer | | | | |
| | Aqua | ad 100 | ad 100 | ad 100 | ad 100 |
| | Preservatives | q.s. | q.s. | q.s. | q.s. |
| | Parfum | q.s. | q.s. | q.s. | q.s. |
| | Carbomer | q.s. | q.s. | q.s. | q.s. |

[0540] Preparation: Mix and dissolve components of phase A. Adjust the pH to pH 5-7 with phase B. Viscosity can be adjusted through Carbomer. Preferred viscosity is between 5000-15000 mPas.

### Example 58

| | | 1 | 2 | 3 | 4 |
|---|---|---|---|---|---|
| | Ingredients (INCI) | % | % | % | % |
| A | Sodium Laureth Sulfate | 13 | 13 | 13 | 13 |
| | Disodium | 3.3 | 3.3 | 3.3 | 3.3 |
| | Cocoamphodiacetate | | | | |
| | Sodium Chloride | 1.2 | 1.2 | 1.2 | 1.2 |
| | Glycol Distearate | 0.7 | 0.7 | 0.7 | 0.7 |
| | Peptid P18 | 0.05 | 0.3 | 0.05 | 0.3 |
| | Climbazole | 0 | 0 | 0.5 | 0.3 |
| | PEG-7 Glyceryl Cocoate | 0.2 | 0.2 | 0.2 | 0.2 |
| | Salicylic Acid | 0.4 | 0.4 | 0.4 | 0.4 |
| | Styrene/Acrylates Copolymer | 0.36 | 0.36 | 0.36 | 0.36 |
| | Laureth-4 | 0.2 | 0.2 | 0.2 | 0.2 |
| | Panthenol | 0.3 | 0.3 | 0.3 | 0.3 |
| | PEG-40 Hydrogenated | 0.3 | 0.3 | 0.3 | 0.3 |
| | Castor Oil | | | | |
| | Hydrogenated Castor Oil | 0.6 | 0.6 | 0.6 | 0.6 |
| | Cocamidopropyl Betaine | 0.9 | 0.9 | 0.9 | 0.9 |
| | Polyquaternium-10 | 0.3 | 0.3 | 0.3 | 0.3 |
| | Glycerin | 0.8 | 0.8 | 0.8 | 0.8 |
| | Aqua | ad 100 | ad 100 | ad 100 | ad 100 |
| | Preservatives | q.s. | q.s. | q.s. | q.s. |
| | Parfum | q.s. | q.s. | q.s. | q.s. |
| B | Citric Acid | q.s. | q.s. | q.s. | q.s. |

[0542] Preparation: Mix and dissolve components of phase A. Adjust the pH to pH 5-7 with phase B. Preferred viscosity is between 5000-15000 mPas.

### Example 59

| | | 1 | 2 | 3 | 4 |
|---|---|---|---|---|---|
| | Ingredients (INCI) | % | % | % | % |
| A | Sodium Laureth Sulfate | 11 | 11 | 11 | 11 |
| | Coco-Betaine | 5 | 5 | 5 | 5 |
| | Dimethicone | 0.9 | 0.9 | 0.9 | 0.9 |
| | Cetyl Alcohol | 0.4 | 0.4 | 0.4 | 0.4 |
| | Hydroxystearyl Cetyl Ether | 0.4 | 0.4 | 0.4 | 0.4 |
| | Sodium Chloride | 0.3 | 0.3 | 0.3 | 0.3 |
| | Cocamide MIPA | 0.4 | 0.4 | 0.4 | 0.4 |
| | Polyquaternium 10 | 0.3 | 0.3 | 0.3 | 0.3 |
| | Propylene Glycol | 0.3 | 0.3 | 0.3 | 0.3 |
| | Pyridoxine HCL | 0.1 | 0.1 | 0.1 | 0.1 |
| | Peptid P18 | 0.05 | 0.3 | 0.05 | 0.3 |
| | Zinc Pyrithione | 0 | 0 | 1 | 0.7 |
| | Aqua | ad 100 | ad 100 | ad 100 | ad 100 |
| | Preservatives | q.s. | q.s. | q.s. | q.s. |
| | Carbomer | q.s. | q.s. | q.s. | q.s. |
| | Parfum | q.s. | q.s. | q.s. | q.s. |

[0544] Preparation: Mix and dissolve components of phase A. Adjust the pH to pH 5-7 with phase B. Viscosity can be adjusted through Carbomer. Preferred viscosity is between 5000-15000 mPas.

### Example 60

| | | 1 | 2 | 3 | 4 |
|---|---|---|---|---|---|
| | Ingredients (INCI) | % | % | % | % |
| A | Sodium Laureth Sulfate | 13 | 13 | 13 | 13 |
| | Polysorbate (21) | 5 | 5 | 5 | 5 |
| | Dimethicone | 0.8 | 0.8 | 0.8 | 0.8 |
| | Cocamidopropyl Betaine | 0.9 | 0.9 | 0.9 | 0.9 |
| | Cetyl Alcohol | 0.4 | 0.4 | 0.4 | 0.4 |
| | Hexylene Glycol | 0.3 | 0.3 | 0.3 | 0.3 |
| | Guar | 0.2 | 0.2 | 0.2 | 0.2 |
| | Hydroxypropyltrimonium | | | | |
| | Chloride | | | | |
| | Cocamide MIPA | 0.5 | 0.5 | 0.5 | 0.5 |
| | Hydroxystearyl Cetyl Ether | 0.6 | 0.6 | 0.6 | 0.6 |
| | Sodium Chloride | 0.3 | 0.3 | 0.3 | 0.3 |
| | Propylene Glycol | 0.3 | 0.3 | 0.3 | 0.3 |
| | Peptid P18 | 0.05 | 0.3 | 0.05 | 0.3 |
| | Pyroctone Olamine | 0 | 0 | 1 | 0.7 |
| | Aqua | ad 100 | ad 100 | ad 100 | ad 100 |
| | Preservatives | q.s. | q.s. | q.s. | q.s. |
| | Carbomer | q.s. | q.s. | q.s. | q.s. |
| | Parfum | q.s. | q.s. | q.s. | q.s. |

[0546] Preparation: Mix and dissolve components of phase A. Adjust the pH to pH 5-7 with phase B. Viscosity can be adjusted through Carbomer. Preferred viscosity is between 5000-15000 mPas.

### Example 61

| | | 1 | 2 | 3 | 4 |
|---|---|---|---|---|---|
| | Ingredients (INCI) | % | % | % | % |
| A | Sodium Laureth Sulfate | 9 | 9 | 9 | 9 |
| | Disodium | 6 | 6 | 6 | 6 |
| | Cocoamphodiacetate | | | | |
| | Glycerin | 2.1 | 2.1 | 2.1 | 2.1 |
| | Glycol Distearate | 1.2 | 1.2 | 1.2 | 1.2 |
| | Sodium Chloride | 0.9 | 0.9 | 0.9 | 0.9 |
| | Sodium Laureth-8 Sulfate | 0.9 | 0.9 | 0.9 | 0.9 |
| | Hexylene Glycol | 0.3 | 0.3 | 0.3 | 0.3 |
| | Polyquaternium-10 | 0.1 | 0.1 | 0.1 | 0.1 |
| | Magnesium Laureth-8 Sulfate | 0.3 | 0.3 | 0.3 | 0.3 |
| | Propylene Glycol | 0.8 | 0.8 | 0.8 | 0.8 |
| | Magnesium Laureth Sulfate | 0.6 | 0.6 | 0.6 | 0.6 |
| | Sodium Oleth Laureth | 0.7 | 0.7 | 0.7 | 0.7 |
| | PEG-55 Propylene | 0.7 | 0.7 | 0.7 | 0.7 |
| | Glycol Oleate | | | | |
| | Peptid P18 | 0.05 | 0.3 | 0.05 | 0.3 |
| | Salicylic Acid | 0 | 0 | 0.5 | 0.3 |
| | Polyquaternium-30 | 0.35 | 0.35 | 0.35 | 0.35 |
| | Magnesium Oleth Sulfate | 0.65 | 0.65 | 0.65 | 0.65 |
| | 2-Oleamido-1,3- | 0.4 | 0.4 | 0.4 | 0.4 |
| | Octadecanediol | | | | |
| | Aqua | ad 100 | ad 100 | ad 100 | ad 100 |
| | Preservatives | q.s. | q.s. | q.s. | q.s. |
| | Carbomer | q.s. | q.s. | q.s. | q.s. |
| | Parfum | q.s. | q.s. | q.s. | q.s. |

[0548] Preparation: Mix and dissolve components of phase A. Adjust the pH to pH 5-7 with phase B. Viscosity can be adjusted through Carbomer. Preferred viscosity is between 5000-15000 mPas.

### Example 62

| | | 1 | 2 | 3 | 4 |
|---|---|---|---|---|---|
| | Ingredients (INCI) | % | % | % | % |
| A | Sodium Laureth Sulfate | 10.5 | 10.5 | 10.5 | 10.5 |
| | Cocamidopropyl Betaine | 8 | 8 | 8 | 8 |
| | Glycerin | 3 | 3 | 3 | 3 |
| | Peptid P18 | 0.05 | 0.3 | 0.05 | 0.3 |
| | Zinc pyrithone | 0 | 0 | 1 | 0.7 |
| | PEG-55 Propylene | 0.7 | 0.7 | 0.7 | 0.7 |
| | Glycol Oleate | | | | |
| | Disodium ricinoleamido | 0.6 | 0.6 | 0.6 | 0.6 |
| | MEA-sulfosuccinate | | | | |
| | Propylene Glycol | 0.7 | 0.7 | 0.7 | 0.7 |
| | Glyceryl Laurate | 0.4 | 0.4 | 0.4 | 0.4 |
| | PPG-5-Ceteth-20 | 0.32 | 0.32 | 0.32 | 0.32 |
| | Acrylates Copolymer | 0.2 | 0.2 | 0.2 | 0.2 |
| | Disodium | 0.54 | 0.54 | 0.54 | 0.54 |
| | Cocoamphodipropionate | | | | |
| | Lecithin | 0.4 | 0.4 | 0.4 | 0.4 |
| | Aqua | ad 100 | ad 100 | ad 100 | ad 100 |
| | Preservatives | q.s. | q.s. | q.s. | q.s. |
| | Parfum | q.s. | q.s. | q.s. | q.s. |
| B | Phosphoric Acid | q.s. | q.s. | q.s. | q.s. |

[0550] Preparation: Mix and dissolve components of phase A. Adjust the pH to pH 5-7 with phase B. Preferred viscosity is between 5000-15000 mPas.

### Example 63

| | | 1 | 2 | 3 | 4 |
|---|---|---|---|---|---|
| | Ingredients (INCI) | % | % | % | % |
| A | Sodium Laureth Sulfate | 9.3 | 9.3 | 9.3 | 9.3 |
| | Sodium Lauryl Sulfate | 7.6 | 7.6 | 7.6 | 7.6 |
| | Cocamide MEA | 1 | 1 | 1 | 1 |
| | Zinc Carbonate | 0.6 | 0.6 | 0.6 | 0.6 |
| | Glycol Distearate | 0.8 | 0.8 | 0.8 | 0.8 |
| | Peptid P18 | 0.05 | 0.3 | 0.05 | 0.3 |
| | Zinc Pyrithione | 0 | 0 | 1 | 0.7 |
| | Cetyl Alcohol | 0.36 | 0.36 | 0.36 | 0.36 |
| | Dimethicone | 0.42 | 0.42 | 0.42 | 0.42 |
| | Sodium Xylenesulfonate | 0.23 | 0.23 | 0.23 | 0.23 |
| | Magnesium Sulfate | 0.37 | 0.37 | 0.37 | 0.37 |
| | Ammonium Laureth Sulfate | 0.9 | 0.9 | 0.9 | 0.9 |
| | Sodium Diethylenetriamine | 0.6 | 0.6 | 0.6 | 0.6 |
| | Pentamethylene Phosphonate | | | | |
| | Etidronic Acid | 0.2 | 0.2 | 0.2 | 0.2 |
| | Sodium | 0.35 | 0.35 | 0.35 | 0.35 |
| | Polynaphthalenesulfonate | | | | |
| | Aqua | ad 100 | ad 100 | ad 100 | ad 100 |
| | Preservatives | q.s. | q.s. | q.s. | q.s. |
| | Sodium Chloride | q.s. | q.s. | q.s. | q.s. |
| | Magnesium Carbonate | q.s. | q.s. | q.s. | q.s. |
| | Hydroxide | | | | |
| | Tetrasodium EDTA | q.s. | q.s. | q.s. | q.s. |
| | Parfum | q.s. | q.s. | q.s. | q.s. |

[0552] Preparation: Mix and dissolve components of phase A. Adjust the pH to pH 5-7 with phase B. Viscosity can be adjusted through Tetrasodium EDTA and/or Sodium Chloride. Preferred viscosity is between 5000-15000 mPas.

### Example 64

| | | 1 | 2 | 3 | 4 |
|---|---|---|---|---|---|
| | Ingredients (INCI) | % | % | % | % |
| A | Sodium Laureth Sulfate | 9.3 | 9.3 | 9.3 | 9.3 |
| | Sodium Lauryl Sulfate | 7.6 | 7.6 | 7.6 | 7.6 |
| | Cocamide MEA | 1 | 1 | 1 | 1 |
| | Zinc Carbonate | 0.6 | 0.6 | 0.6 | 0.6 |
| | Glycol Distearate | 0.8 | 0.8 | 0.8 | 0.8 |
| | Sodium Chloride | 0.7 | 0.7 | 0.7 | 0.7 |
| | Peptid P18 | 0.05 | 0.3 | 0.05 | 0.3 |
| | Zinc Pyrithione | 0 | 0 | 1 | 0.7 |
| | Dimethicone | 0.42 | 0.42 | 0.42 | 0.42 |
| | Cetyl Alcohol | 0.36 | 0.36 | 0.36 | 0.36 |
| | Sodium Xylenesulfonate | 0.23 | 0.23 | 0.23 | 0.23 |
| | Magnesium Sulfate | 0.37 | 0.37 | 0.37 | 0.37 |
| | Guar | 0.3 | 0.3 | 0.3 | 0.3 |
| | Hydroxypropyltrimonium | | | | |
| | Chloride | | | | |
| | Ammonium Laureth Sulfate | 0.9 | 0.9 | 0.9 | 0.9 |
| | Sodium Diethylenetriamine | 0.6 | 0.6 | 0.6 | 0.6 |
| | Pentamethylene Phosphonate | | | | |
| | Etidronic Acid | 0.2 | 0.2 | 0.2 | 0.2 |
| | Paraffinum Liquidum | 0.3 | 0.3 | 0.3 | 0.3 |
| | Tocopheryl Acetate | 0.3 | 0.3 | 0.3 | 0.3 |
| | Aqua | ad 100 | ad 100 | ad 100 | ad 100 |
| | Preservatives | q.s. | q.s. | q.s. | q.s. |
| | Parfum | q.s. | q.s. | q.s. | q.s. |
| | Magnesium Carbonate | q.s. | q.s. | q.s. | q.s. |
| | Hydroxide | | | | |
| | Sodium | q.s. | q.s. | q.s. | q.s. |
| | Polynaphthalenesulfonate | | | | |

[0554] Preparation: Mix and dissolve components of phase A. Adjust the pH to pH 5-7 with phase B. Viscosity can be adjusted through Magnesium Carbonate Hydroxide and/or Sodium Polynaphthalenesulfonate. Preferred viscosity is between 5000-15000 mPas.

### Example 65

| | | 1 | 2 | 3 | 4 |
|---|---|---|---|---|---|
| | Ingredients (INCI) | % | % | % | % |
| A | Ammonium Laureth Sulfate | 11.2 | 11.2 | 11.2 | 11.2 |
| | Ammonium Lauryl Sulfate | 8.6 | 8.6 | 8.6 | 8.6 |
| | Glycol Distearate | 0.8 | 0.8 | 0.8 | 0.8 |
| | Dimethicone | 0.9 | 0.9 | 0.9 | 0.9 |
| | Peptid P18 | 0.05 | 0.3 | 0.05 | 0.3 |
| | Zinc Pyrithione | 0 | 0 | 1 | 0.7 |
| | Cetyl Alcohol | 0.3 | 0.3 | 0.3 | 0.3 |
| | Ammonium Xylenesulphonate | 0.23 | 0.23 | 0.23 | 0.23 |
| | Cocamide MEA | 0.8 | 0.8 | 0.8 | 0.8 |
| | Hydrogenated Polydecene | 0.3 | 0.3 | 0.3 | 0.3 |
| | PEG-7M | 0.1 | 0.1 | 0.1 | 0.1 |
| | Trimethylolpropane | 0.2 | 0.2 | 0.2 | 0.2 |
| | Tricaprylate/Tricaprate | | | | |
| | Sodium | 0.35 | 0.35 | 0.35 | 0.35 |
| | Polynaphthalenesulphonate | | | | |
| | Tocopherol | 0.8 | 0.8 | 0.8 | 0.8 |
| | Aqua | ad 100 | ad 100 | ad 100 | ad 100 |
| | Preservatives | q.s. | q.s. | q.s. | q.s. |
| | Parfum | q.s. | q.s. | q.s. | q.s. |
| | Sodium Chloride | q.s. | q.s. | q.s. | q.s. |
| | Tetrasodium EDTA | q.s. | q.s. | q.s. | q.s. |
| B | Citric Acid | q.s. | q.s. | q.s. | q.s. |
| | Sodium citrate | q.s. | q.s. | q.s. | q.s. |

[0556] Preparation: Mix and dissolve components of phase A. Adjust the pH to pH 5-7 with phase B. Viscosity can be adjusted through Tetrasodium EDTA and/or Sodium Chloride. Preferred viscosity is between 5000-15000 mPas.

### Example 66

| | | 1 | 2 | 3 | 4 |
|---|---|---|---|---|---|
| | Ingredients (INCI) | % | % | % | % |
| A | Ammonium Laureth Sulfate | 11.2 | 11.2 | 11.2 | 11.2 |
| | Ammonium Lauryl Sulfate | 8.6 | 8.6 | 8.6 | 8.6 |
| | Dimethicone | 1 | 1 | 1 | 1 |
| | Glycol Distearate | 0.8 | 0.8 | 0.8 | 0.8 |
| | Peptid P18 | 0.05 | 0.3 | 0.05 | 0.3 |
| | Zinc Pyrithione | 0 | 0 | 1 | 0.7 |
| | Cetyl Alcohol | 0.3 | 0.3 | 0.3 | 0.3 |
| | Cocamide MEA | 0.8 | 0.8 | 0.8 | 0.8 |
| | Hydrogenated Polydecene | 0.3 | 0.3 | 0.3 | 0.3 |
| | Trimethylolpropane | 0.2 | 0.2 | 0.2 | 0.2 |
| | Tricaprylate/tricaprate | | | | |
| | Ammonium Xylenesulfonate | 0.23 | 0.23 | 0.23 | 0.23 |
| | Sodium | 0.35 | 0.35 | 0.35 | 0.35 |
| | Polynapthalenesulfonate | | | | |
| | Aqua | ad 100 | ad 100 | ad 100 | ad 100 |
| | Preservatives | q.s. | q.s. | q.s. | q.s. |
| | Sodium Chloride | q.s. | q.s. | q.s. | q.s. |
| | Tetrasodium EDTA | q.s. | q.s. | q.s. | q.s. |
| | Parfum | q.s. | q.s. | q.s. | q.s. |
| B | Citric Acid | q.s. | q.s. | q.s. | q.s. |
| | Sodium citrate | q.s. | q.s. | q.s. | q.s. |

[0558] Preparation: Mix and dissolve components of phase A. Adjust the pH to pH 5-7 with phase B. Viscosity can be adjusted through Tetrasodium EDTA and/or Sodium Chloride. Preferred viscosity is between 5000-15000 mPas.

Unless otherwise stated the term P18 refers to a peptide of SEQ ID NO:3.
The disclosure of documents cited herein is incorporated by reference.

1. A cosmetic composition comprising, in a cosmetic carrier, a peptide which comprises at least one sequence motif of the following general formula I
Hel1-HB-Hel2 (I)
in which
HB comprises 1 to 5 continuous amino acid residues and is a part sequence motif with the function of a helix breaker, and
Hel1 and Hel2 are identical or different part sequence motifs which each comprise 5 to 15 continuous amino acid residues which are essentially selected from hydrophilic residues and hydrophobic residues different from proline, and are in each case capable of forming an alpha-helix arm where at least one of the helix arms has, in its axial projection, an incomplete separation into a hydrophobic and hydrophilic helix half.

2. A cosmetic composition comprising, in a cosmetic carrier, a peptide which comprises at least one sequence motif of the following general formula I
Hel1-HB-Hel2 (I)
in which
HB comprises 1 to 5 continuous amino acid residues and is a part sequence motif with the function of a helix breaker, and
Hel1 and Hel2 are identical or different part sequence motifs which each comprise 5 to 15 continuous amino acid residues which are essentially selected from hydrophilic residues and hydrophobic residues different from proline, and are in each case capable of forming an alpha-helix arm,
where the peptide has a percentage alpha-helicity value of from about 25 to 98%, in 50% (v/v) trifluoroacetic acid, pH 7.0, or about 10 to 70% in 30 mM SDS, pH 7.0, in each case determined by CD spectrometry.

3. A cosmetic composition comprising, in a cosmetic carrier, at least one peptide with a sequence or a repetitive sequence motif according to SEQ ID NO: 1:
(SEQ ID NO: 1)
X₁ X₂K X₃ X₄ X₅KIP X₁₀ KFX₆X₇ X₈ AX₉KF
in which
X₁₀ is a peptide bond or one or two arbitrary basic or hydrophobic amino acid residues or one or two proline residues and
X₁ to X₉ are arbitrary basic amino acid residues or hydrophobic amino acid residues different from proline;
where the repetitive sequence motifs may be identical or different;
and/or mutants or derivatives thereof.

4. The composition of claim 1, comprising at least one peptide with a sequence or a repetitive sequence motif according to SEQ ID NO: 2:
(SEQ ID NO: 2)
X₁ X₂K X₃ X₄ X₅KIP X₁₁ X₁₂ KFX₆X₇ X₈ AX₉KF
in which
X₁ is lysine, arginine or phenylalanine,
X₂ is lysine or tryptophan,
X₃ is leucine or lysine,
X₄ is phenylalanine or leucine,
X₅ is leucine or lysine,
X₆ is leucine or lysine,
X₇ is histidine or lysine,
X₈ is alanine, leucine, valine or serine,
X₉ is leucine or lysine,
X₁₁ is proline or a chemical bond, and
X₁₂ is proline or a chemical bond,
First Preliminary Amendment where the repetitive sequence motifs are identical or different;
and/or mutants or derivatives thereof.

5. The composition of claim 4, comprising a peptide with a sequence or a repetitive sequence motif according to SEQ ID NO: 3

| | |
|---|---|
| KWKLFKKIPKFLHLAKKF | (SEQ ID NO: 3) |

and/or a mutant or derivative thereof.

6. The composition of claim 1, comprising a peptide with a repetitive sequence motif, where a plurality of peptides of the general formula I or according to SEQ ID NO: 1, 2 or 3 or variants or derivatives thereof are peptidically linked together via linker groups.

7. The composition of claim 6, where the linkers comprise 1 to 10 continuous identical or different amino acid residues, preferably selected from alanine, glycine, threonine and serine.

8. The composition of claim 1, where the C-terminal carboxyl group of the peptide is amidated.

9. The composition of claim 1, containing at least one peptide as defined above, which under standard conditions shows a minimum inhibitory concentration for Malassezia furfur of about 1500 to 0.1 μM.

10. A composition comprising a fusion product of at least one cosmetic auxiliary or active ingredient and at least one peptide of claim 1.

11. The composition of claim 1, additionally comprising at least one further cosmetic or pharmaceutical active ingredient.

12. The composition of claim 1, additionally comprising at least one antiinflammatory active ingredient.

13. The composition of claim 1, additionally comprising an antimicrobial active ingredient for inhibiting the growth and/or the activity of undesired germs.

14. The composition of claim 1, additionally comprising a sebum-regulating active ingredient.

15. The composition of claim 1, where the peptide is present in a fraction of from 0.0001 to 50% by weight, based on the total weight of the finished composition.

16. A peptide according to the definition in claim 1 or a fusion product of at least one cosmetic auxiliary or active ingredient and at least one peptide of claim 1, optionally in combination with at least one further antifungal agent, for use in a cosmetic composition for the treatment or prevention of dandruff, in particular scurf; or in cosmetic compositions in which the peptide is present as preservative.

17. The peptide or fusion polypeptide of claim 16, where the peptide is used for inhibiting the growth and/or the activity of lipophilic fungi, in particular Malassezia ssp., such as, in particular, Malassezia furfur.

18. The peptide or fusion polypeptide of claim 16, where natural skin organisms are essentially not inhibited in their growth and/or their activity during dandruff treatment.

19. A method for producing a cosmetic composition of claim 1, where a peptide according to the definition in claim 1 is formulated together with at least one customary cosmetic auxiliary and, if appropriate, further cosmetic or pharmaceutical active ingredients to give the desired administration form.

20. The peptide of claim 1.

21. A nucleic acid encoding the peptide of claim 1.

22. A complementary nucleic acid which hybridizes with a nucleic acid according to claim 21 under stringent conditions.

23. A screening method for antidandruff peptides, where, using a complementary nucleic acid according to claim 22 as probe under stringent conditions, a nucleic-acid-containing sample is screened for hybridizing sequences using the probe.

24. A dispensing system for releasing the peptide of claim 1, where the peptide and, if appropriate, further ingredients present is/are associated with liposomes, zeolites, cyclodextrins, polyethyleneimine-based vector systems.

The application's sequence listing, which the Patent Office published only in electronic form, follows.

SEQUENCE LISTING (4738 sequences)

SEQ ID NO: 1 - protein, 19 aa, Artificial
  Sequence Motif 1
  MISC_FEATURE (1)..(1): Xaa = basic amino acid or hydrophobic amino acid different from Pro
  MISC_FEATURE (2)..(2): Xaa = basic amino acid or hydrophobic amino acid different from Pro
  MISC_FEATURE (4)..(4): Xaa = basic amino acid or hydrophobic amino acid different from Pro
  MISC_FEATURE (5)..(5): Xaa = basic amino acid or hydrophobic amino acid different from Pro
  MISC_FEATURE (6)..(6): Xaa = basic amino acid or hydrophobic amino acid different from Pro
  MISC_FEATURE (10)..(10): Xaa = missing or is Pro or Pro-Pro
  MISC_FEATURE (13)..(13): Xaa = basic amino acid or hydrophobic amino acid different from Pro
  MISC_FEATURE (14)..(14): Xaa = basic amino acid or hydrophobic amino acid different from Pro
  MISC_FEATURE (15)..(15): Xaa = basic amino acid or hydrophobic amino acid different from Pro
  MISC_FEATURE (17)..(17): Xaa = basic amino acid or hydrophobic amino acid different from Pro
XXKXXXKIPXKFXXXAXKF

SEQ ID NO: 2 - protein, 20 aa, Artificial
  Sequence Motif 2
  MISC_FEATURE (1)..(1): Xaa = Lys, Arg or Phe
  MISC_FEATURE (2)..(2): Xaa = Lys or Trp
  MISC_FEATURE (4)..(4): Xaa = Leu or Lys
  MISC_FEATURE (5)..(5): Xaa = Phe or Leu
  MISC_FEATURE (6)..(6): Xaa = Leu or Lys
  MISC_FEATURE (10)..(10): Xaa = Pro or missing
  MISC_FEATURE (11)..(11): Xaa = Pro or missing
  MISC_FEATURE (14)..(14): Xaa = Leu or Lys
  MISC_FEATURE (15)..(15): Xaa = His or Lys
  MISC_FEATURE (16)..(16): Xaa = Ala, Leu, Val or Ser
  MISC_FEATURE (18)..(18): Xaa = Leu or Lys
XXKXXXKIPXXKFXXXAXKF

SEQ ID NO: 3 - protein, 18 aa, Artificial
  P18 Peptide
  MOD_RES (18)..(18): AMIDATION
KWKLFKKIPKFLHLAKKF

SEQ ID NO: 4 - protein, 18 aa, Artificial
  RP18 Peptide
RWKLFKKIPKFLHLAKKF

SEQ ID NO: 5 - protein, 18 aa, Artificial
  KKFP18 Peptide
FKKLFKKIPKFLHAAKKF

SEQ ID NO: 6 - protein, 18 aa, Artificial
  KKLP18 Peptide
KWKLLKKIPKFKKLALKF

SEQ ID NO: 7 - protein, 18 aa, Artificial
  AP18 Peptide
KWKLFKKIPKFLHAAKKF

SEQ ID NO: 8 - protein, 18 aa, Artificial
  KFLP18 Peptide
KWKKFLKIPKFLHAAKKF

SEQ ID NO: 9 - protein, 18 aa, Artificial
  KLLP18 Peptide
KWKKLLKIPKFLHAAKKF

SEQ ID NO: 10 - protein, 20 aa, Artificial
  Short Peptide
  misc_feature (2)..(2): Xaa can be any naturally occurring amino acid
  misc_feature (4)..(6): Xaa can be any naturally occurring amino acid
  misc_feature (10)..(11): Xaa can be any naturally occurring amino acid
  misc_feature (16)..(16): Xaa can be any naturally occurring amino acid
KXKXXXKIPXXKFLHXAKKF

SEQ ID NO: 11 - protein, 20 aa, Artificial
  Short Peptide
KKKLFLKIPPPKFLHAALKF

SEQ ID NO: 12 - protein, 20 aa, Artificial
  Short Peptide
RKKLFLKIPPPKFLHAALKF

SEQ ID NO: 13 - protein, 20 aa, Artificial
  Short Peptide
FKKLFLKIPPPKFLHAALKF

SEQ ID NO: 14 - protein, 20 aa, Artificial
  Short Peptide
KWKLFLKIPPPKFLHAALKF

SEQ ID NO: 15 - protein, 20 aa, Artificial
  Short Peptide
RWKLFLKIPPPKFLHAALKF

SEQ ID NO: 16 - protein, 20 aa, Artificial
  Short Peptide
FWKLFLKIPPPKFLHAALKF

SEQ ID NO: 17 - protein, 20 aa, Artificial
  Short Peptide
KKKKFLKIPPPKFLHAALKF

SEQ ID NO: 18 - protein, 20 aa, Artificial
  Short Peptide
RKKKFLKIPPPKFLHAALKF

SEQ ID NO: 19 - protein, 20 aa, Artificial
  Short Peptide
FKKKFLKIPPPKFLHAALKF

SEQ ID NO: 20 - protein, 20 aa, Artificial
  Short Peptide
KWKKFLKIPPPKFLHAALKF

SEQ ID NO: 21 - protein, 20 aa, Artificial
  Short Peptide
RWKKFLKIPPPKFLHAALKF

SEQ ID NO: 22 - protein, 20 aa, Artificial
  Short Peptide
FWKKFLKIPPPKFLHAALKF

SEQ ID NO: 23 - protein, 20 aa, Artificial
  Short Peptide
KKKLLLKIPPPKFLHAALKF

SEQ ID NO: 24 - protein, 20 aa, Artificial
  Short Peptide
RKKLLLKIPPPKFLHAALKF

SEQ ID NO: 25 - protein, 20 aa, Artificial
  Short Peptide
FKKLLLKIPPPKFLHAALKF

SEQ ID NO: 26 - protein, 20 aa, Artificial
  Short Peptide
KWKLLLKIPPPKFLHAALKF

SEQ ID NO: 27 - protein, 20 aa, Artificial
  Short Peptide
RWKLLLKIPPPKFLHAALKF

SEQ ID NO: 28 - protein, 20 aa, Artificial
  Short Peptide
FWKLLLKIPPPKFLHAALKF

SEQ ID NO: 29 - protein, 20 aa, Artificial
  Short Peptide
KKKKLLKIPPPKFLHAALKF

SEQ ID NO: 30 - protein, 20 aa, Artificial
  Short Peptide
RKKKLLKIPPPKFLHAALKF

SEQ ID NO: 31 - protein, 20 aa, Artificial
  Short Peptide
FKKKLLKIPPPKFLHAALKF

SEQ ID NO: 32 - protein, 20 aa, Artificial
  Short Peptide
KWKKLLKIPPPKFLHAALKF

SEQ ID NO: 33 - protein, 20 aa, Artificial
  Short Peptide
RWKKLLKIPPPKFLHAALKF

SEQ ID NO: 34 - protein, 20 aa, Artificial
  Short Peptide
FWKKLLKIPPPKFLHAALKF

SEQ ID NO: 35 - protein, 20 aa, Artificial
  Short Peptide
KKKLFKKIPPPKFLHAALKF

SEQ ID NO: 36 - protein, 20 aa, Artificial
  Short Peptide
RKKLFKKIPPPKFLHAALKF

SEQ ID NO: 37 - protein, 20 aa, Artificial
  Short Peptide
FKKLFKKIPPPKFLHAALKF

SEQ ID NO: 38 - protein, 20 aa, Artificial
  Short Peptide
KWKLFKKIPPPKFLHAALKF

SEQ ID NO: 39 - protein, 20 aa, Artificial
  Short Peptide
RWKLFKKIPPPKFLHAALKF

SEQ ID NO: 40 - protein, 20 aa, Artificial
  Short Peptide
FWKLFKKIPPPKFLHAALKF

SEQ ID NO: 41 - protein, 20 aa, Artificial
  Short Peptide
KKKKFKKIPPPKFLHAALKF

SEQ ID NO: 42 - protein, 20 aa, Artificial
  Short Peptide
RKKKFKKIPPPKFLHAALKF

SEQ ID NO: 43 - protein, 20 aa, Artificial
  Short Peptide
FKKKFKKIPPPKFLHAALKF

SEQ ID NO: 44 - protein, 20 aa, Artificial
  Short Peptide
KWKKFKKIPPPKFLHAALKF

SEQ ID NO: 45 - protein, 20 aa, Artificial
  Short Peptide
RWKKFKKIPPPKFLHAALKF

SEQ ID NO: 46 - protein, 20 aa, Artificial
  Short Peptide
FWKKFKKIPPPKFLHAALKF

SEQ ID NO: 47 - protein, 20 aa, Artificial
  Short Peptide
KKKLLKKIPPPKFLHAALKF

SEQ ID NO: 48 - protein, 20 aa, Artificial
  Short Peptide
RKKLLKKIPPPKFLHAALKF

SEQ ID NO: 49 - protein, 20 aa, Artificial
  Short Peptide
FKKLLKKIPPPKFLHAALKF

SEQ ID NO: 50 - protein, 20 aa, Artificial
  Short Peptide
KWKLLKKIPPPKFLHAALKF

SEQ ID NO: 51 - protein, 20 aa, Artificial
  Short Peptide
RWKLLKKIPPPKFLHAALKF

SEQ ID NO: 52 - protein, 20 aa, Artificial
  Short Peptide
FWKLLKKIPPPKFLHAALKF

SEQ ID NO: 53 - protein, 20 aa, Artificial
  Short Peptide
KKKKLKKIPPPKFLHAALKF

SEQ ID NO: 54 - protein, 20 aa, Artificial
  Short Peptide
RKKKLKKIPPPKFLHAALKF

SEQ ID NO: 55 - protein, 20 aa, Artificial
  Short Peptide
FKKKLKKIPPPKFLHAALKF

SEQ ID NO: 56 - protein, 20 aa, Artificial
  Short Peptide
KWKKLKKIPPPKFLHAALKF

SEQ ID NO: 57 - protein, 20 aa, Artificial
  Short Peptide
RWKKLKKIPPPKFLHAALKF

SEQ ID NO: 58 - protein, 20 aa, Artificial
  Short Peptide
FWKKLKKIPPPKFLHAALKF

SEQ ID NO: 59 - protein, 19 aa, Artificial
  Short Peptide
KKKLFLKIPPKFLHAALKF

SEQ ID NO: 60 - protein, 19 aa, Artificial
  Short Peptide
RKKLFLKIPPKFLHAALKF

SEQ ID NO: 61 - protein, 19 aa, Artificial
  Short Peptide
FKKLFLKIPPKFLHAALKF

SEQ ID NO: 62 - protein, 19 aa, Artificial
  Short Peptide
KWKLFLKIPPKFLHAALKF

SEQ ID NO: 63 - protein, 19 aa, Artificial
  Short Peptide
RWKLFLKIPPKFLHAALKF

SEQ ID NO: 64 - protein, 19 aa, Artificial
  Short Peptide
FWKLFLKIPPKFLHAALKF

SEQ ID NO: 65 - protein, 19 aa, Artificial
  Short Peptide
KKKKFLKIPPKFLHAALKF

SEQ ID NO: 66 - protein, 19 aa, Artificial
  Short Peptide
RKKKFLKIPPKFLHAALKF

SEQ ID NO: 67 - protein, 19 aa, Artificial
  Short Peptide
FKKKFLKIPPKFLHAALKF

SEQ ID NO: 68 - protein, 19 aa, Artificial
  Short Peptide
KWKKFLKIPPKFLHAALKF

SEQ ID NO: 69 - protein, 19 aa, Artificial
  Short Peptide
RWKKFLKIPPKFLHAALKF

SEQ ID NO: 70 - protein, 19 aa, Artificial
  Short Peptide
FWKKFLKIPPKFLHAALKF

SEQ ID NO: 71 - protein, 19 aa, Artificial
  Short Peptide
KKKLLLKIPPKFLHAALKF

SEQ ID NO: 72 - protein, 19 aa, Artificial
  Short Peptide
RKKLLLKIPPKFLHAALKF

SEQ ID NO: 73 - protein, 19 aa, Artificial
  Short Peptide
FKKLLLKIPPKFLHAALKF

SEQ ID NO: 74 - protein, 19 aa, Artificial
  Short Peptide
KWKLLLKIPPKFLHAALKF

SEQ ID NO: 75 - protein, 19 aa, Artificial
  Short Peptide
RWKLLLKIPPKFLHAALKF

SEQ ID NO: 76 - protein, 19 aa, Artificial
  Short Peptide
FWKLLLKIPPKFLHAALKF

SEQ ID NO: 77 - protein, 19 aa, Artificial
  Short Peptide
KKKKLLKIPPKFLHAALKF

SEQ ID NO: 78 - protein, 19 aa, Artificial
  Short Peptide
RKKKLLKIPPKFLHAALKF

SEQ ID NO: 79 - protein, 19 aa, Artificial
  Short Peptide
FKKKLLKIPPKFLHAALKF

SEQ ID NO: 80 - protein, 19 aa, Artificial
  Short Peptide
KWKKLLKIPPKFLHAALKF

SEQ ID NO: 81 - protein, 19 aa, Artificial
  Short Peptide
RWKKLLKIPPKFLHAALKF

SEQ ID NO: 82 - protein, 19 aa, Artificial
  Short Peptide
FWKKLLKIPPKFLHAALKF

SEQ ID NO: 83 - protein, 19 aa, Artificial
  Short Peptide
KKKLFKKIPPKFLHAALKF

SEQ ID NO: 84 - protein, 19 aa, Artificial
  Short Peptide
RKKLFKKIPPKFLHAALKF

SEQ ID NO: 85 - protein, 19 aa, Artificial
  Short Peptide
FKKLFKKIPPKFLHAALKF

SEQ ID NO: 86 - protein, 19 aa, Artificial
  Short Peptide
KWKLFKKIPPKFLHAALKF

SEQ ID NO: 87 - protein, 19 aa, Artificial
  Short Peptide
RWKLFKKIPPKFLHAALKF

SEQ ID NO: 88 - protein, 19 aa, Artificial
  Short Peptide
FWKLFKKIPPKFLHAALKF

SEQ ID NO: 89 - protein, 19 aa, Artificial
  Short Peptide
KKKKFKKIPPKFLHAALKF

SEQ ID NO: 90 - protein, 19 aa, Artificial
  Short Peptide
RKKKFKKIPPKFLHAALKF

SEQ ID NO: 91 - protein, 19 aa, Artificial
  Short Peptide
FKKKFKKIPPKFLHAALKF

SEQ ID NO: 92 - protein, 19 aa, Artificial
  Short Peptide
KWKKFKKIPPKFLHAALKF

SEQ ID NO: 93 - protein, 19 aa, Artificial
  Short Peptide
RWKKFKKIPPKFLHAALKF

SEQ ID NO: 94 - protein, 19 aa, Artificial
  Short Peptide
FWKKFKKIPPKFLHAALKF

SEQ ID NO: 95 - protein, 19 aa, Artificial
  Short Peptide
KKKLLKKIPPKFLHAALKF

SEQ ID NO: 96 - protein, 19 aa, Artificial
  Short Peptide
RKKLLKKIPPKFLHAALKF

SEQ ID NO: 97 - protein, 19 aa, Artificial
  Short Peptide
FKKLLKKIPPKFLHAALKF

SEQ ID NO: 98 - protein, 19 aa, Artificial
  Short Peptide
KWKLLKKIPPKFLHAALKF

SEQ ID NO: 99 - protein, 19 aa, Artificial
  Short Peptide
RWKLLKKIPPKFLHAALKF

SEQ ID NO: 100 - protein, 19 aa, Artificial
  Short Peptide
FWKLLKKIPPKFLHAALKF

SEQ ID NO: 101 - protein, 19 aa, Artificial
  Short Peptide
KKKKLKKIPPKFLHAALKF

SEQ ID NO: 102 - protein, 19 aa, Artificial
  Short Peptide
RKKKLKKIPPKFLHAALKF

SEQ ID NO: 103 - protein, 19 aa, Artificial
  Short Peptide
FKKKLKKIPPKFLHAALKF

SEQ ID NO: 104 - protein, 19 aa, Artificial
  Short Peptide
KWKKLKKIPPKFLHAALKF

SEQ ID NO: 105 - protein, 19 aa, Artificial
  Short Peptide
RWKKLKKIPPKFLHAALKF

SEQ ID NO: 106 - protein, 19 aa, Artificial
  Short Peptide
FWKKLKKIPPKFLHAALKF

SEQ ID NO: 107 - protein, 18 aa, Artificial
  Short Peptide
KKKLFLKIPKFLHAALKF

SEQ ID NO: 108 - protein, 18 aa, Artificial
  Short Peptide
RKKLFLKIPKFLHAALKF

SEQ ID NO: 109 - protein, 18 aa, Artificial
  Short Peptide
FKKLFLKIPKFLHAALKF

SEQ ID NO: 110 - protein, 18 aa, Artificial
  Short Peptide
KWKLFLKIPKFLHAALKF

SEQ ID NO: 111 - protein, 18 aa, Artificial
  Short Peptide
RWKLFLKIPKFLHAALKF

SEQ ID NO: 112 - protein, 18 aa, Artificial
  Short Peptide
FWKLFLKIPKFLHAALKF

SEQ ID NO: 113 - protein, 18 aa, Artificial
  Short Peptide
KKKKFLKIPKFLHAALKF

SEQ ID NO: 114 - protein, 18 aa, Artificial
  Short Peptide
RKKKFLKIPKFLHAALKF

SEQ ID NO: 115 - protein, 18 aa, Artificial
  Short Peptide
FKKKFLKIPKFLHAALKF

SEQ ID NO: 116 - protein, 18 aa, Artificial
  Short Peptide
KWKKFLKIPKFLHAALKF

SEQ ID NO: 117 - protein, 18 aa, Artificial
  Short Peptide
RWKKFLKIPKFLHAALKF

SEQ ID NO: 118 - protein, 18 aa, Artificial
  Short Peptide
FWKKFLKIPKFLHAALKF

SEQ ID NO: 119 - protein, 18 aa, Artificial
  Short Peptide
KKKLLLKIPKFLHAALKF

SEQ ID NO: 120 - protein, 18 aa, Artificial
  Short Peptide
RKKLLLKIPKFLHAALKF

SEQ ID NO: 121 - protein, 18 aa, Artificial
  Short Peptide
FKKLLLKIPKFLHAALKF

SEQ ID NO: 122 - protein, 18 aa, Artificial
  Short Peptide
KWKLLLKIPKFLHAALKF

SEQ ID NO: 123 - protein, 18 aa, Artificial
  Short Peptide
RWKLLLKIPKFLHAALKF

SEQ ID NO: 124 - protein, 18 aa, Artificial
  Short Peptide
FWKLLLKIPKFLHAALKF

SEQ ID NO: 125 - protein, 18 aa, Artificial
  Short Peptide
KKKKLLKIPKFLHAALKF

SEQ ID NO: 126 - protein, 18 aa, Artificial
  Short Peptide
RKKKLLKIPKFLHAALKF

SEQ ID NO: 127 - protein, 18 aa, Artificial
  Short Peptide
FKKKLLKIPKFLHAALKF

SEQ ID NO: 128 - protein, 18 aa, Artificial
  Short Peptide
KWKKLLKIPKFLHAALKF

SEQ ID NO: 129 - protein, 18 aa, Artificial
  Short Peptide
RWKKLLKIPKFLHAALKF

SEQ ID NO: 130 - protein, 18 aa, Artificial
  Short Peptide
FWKKLLKIPKFLHAALKF

SEQ ID NO: 131 - protein, 18 aa, Artificial
  Short Peptide
KKKLFKKIPKFLHAALKF

SEQ ID NO: 132 - protein, 18 aa, Artificial
  Short Peptide
RKKLFKKIPKFLHAALKF

SEQ ID NO: 133 - protein, 18 aa, Artificial
  Short Peptide
FKKLFKKIPKFLHAALKF

SEQ ID NO: 134 - protein, 18 aa, Artificial
  Short Peptide
KWKLFKKIPKFLHAALKF

SEQ ID NO: 135 - protein, 18 aa, Artificial
  Short Peptide
RWKLFKKIPKFLHAALKF

SEQ ID NO: 136 - protein, 18 aa, Artificial
  Short Peptide
FWKLFKKIPKFLHAALKF

SEQ ID NO: 137 - protein, 18 aa, Artificial
  Short Peptide
KKKKFKKIPKFLHAALKF

SEQ ID NO: 138 - protein, 18 aa, Artificial
  Short Peptide
RKKKFKKIPKFLHAALKF

SEQ ID NO: 139 - protein, 18 aa, Artificial
  Short Peptide
FKKKFKKIPKFLHAALKF

SEQ ID NO: 140 - protein, 18 aa, Artificial
  Short Peptide
KWKKFKKIPKFLHAALKF

SEQ ID NO: 141 - protein, 18 aa, Artificial
  Short Peptide
RWKKFKKIPKFLHAALKF

SEQ ID NO: 142 - protein, 18 aa, Artificial
  Short Peptide
FWKKFKKIPKFLHAALKF

SEQ ID NO: 143 - protein, 18 aa, Artificial
  Short Peptide
KKKLLKKIPKFLHAALKF

SEQ ID NO: 144 - protein, 18 aa, Artificial
  Short Peptide
RKKLLKKIPKFLHAALKF

SEQ ID NO: 145 - protein, 18 aa, Artificial
  Short Peptide
FKKLLKKIPKFLHAALKF

SEQ ID NO: 146 - protein, 18 aa, Artificial
  Short Peptide
KWKLLKKIPKFLHAALKF

SEQ ID NO: 147 - protein, 18 aa, Artificial
  Short Peptide
RWKLLKKIPKFLHAALKF

SEQ ID NO: 148 - protein, 18 aa, Artificial
  Short Peptide
FWKLLKKIPKFLHAALKF

SEQ ID NO: 149 - protein, 18 aa, Artificial
  Short Peptide
KKKKLKKIPKFLHAALKF

SEQ ID NO: 150 - protein, 18 aa, Artificial
  Short Peptide
RKKKLKKIPKFLHAALKF

SEQ ID NO: 151 - protein, 18 aa, Artificial
  Short Peptide
FKKKLKKIPKFLHAALKF

SEQ ID NO: 152 - protein, 18 aa, Artificial
  Short Peptide
KWKKLKKIPKFLHAALKF

SEQ ID NO: 153 - protein, 18 aa, Artificial
  Short Peptide
RWKKLKKIPKFLHAALKF

SEQ ID NO: 154 - protein, 18 aa, Artificial
  Short Peptide
FWKKLKKIPKFLHAALKF

SEQ ID NO: 155 - protein, 20 aa, Artificial
  Short Peptide
KKKLFLKIPPPKFKHAALKF

SEQ ID NO: 156 - protein, 20 aa, Artificial
  Short Peptide
RKKLFLKIPPPKFKHAALKF

SEQ ID NO: 157 - protein, 20 aa, Artificial
  Short Peptide
FKKLFLKIPPPKFKHAALKF

SEQ ID NO: 158 - protein, 20 aa, Artificial
  Short Peptide
KWKLFLKIPPPKFKHAALKF

SEQ ID NO: 159 - protein, 20 aa, Artificial
  Short Peptide
RWKLFLKIPPPKFKHAALKF

SEQ ID NO: 160 - protein, 20 aa, Artificial
  Short Peptide
FWKLFLKIPPPKFKHAALKF

SEQ ID NO: 161 - protein, 20 aa, Artificial
  Short Peptide
KKKKFLKIPPPKFKHAALKF

SEQ ID NO: 162 - protein, 20 aa, Artificial
  Short Peptide
RKKKFLKIPPPKFKHAALKF

SEQ ID NO: 163 - protein, 20 aa, Artificial
  Short Peptide
FKKKFLKIPPPKFKHAALKF

SEQ ID NO: 164 - protein, 20 aa, Artificial
  Short Peptide
KWKKFLKIPPPKFKHAALKF

SEQ ID NO: 165 - protein, 20 aa, Artificial
  Short Peptide
RWKKFLKIPPPKFKHAALKF

SEQ ID NO: 166 - protein, 20 aa, Artificial
  Short Peptide
FWKKFLKIPPPKFKHAALKF

SEQ ID NO: 167 - protein, 20 aa, Artificial
  Short Peptide
KKKLLLKIPPPKFKHAALKF

SEQ ID NO: 168 - protein, 20 aa, Artificial
  Short Peptide
RKKLLLKIPPPKFKHAALKF

SEQ ID NO: 169 - protein, 20 aa, Artificial
  Short Peptide
FKKLLLKIPPPKFKHAALKF

SEQ ID NO: 170 - protein, 20 aa, Artificial
  Short Peptide
KWKLLLKIPPPKFKHAALKF

SEQ ID NO: 171 - protein, 20 aa, Artificial
  Short Peptide
RWKLLLKIPPPKFKHAALKF

SEQ ID NO: 172 - protein, 20 aa, Artificial
  Short Peptide
FWKLLLKIPPPKFKHAALKF

SEQ ID NO: 173 - protein, 20 aa, Artificial
  Short Peptide
KKKKLLKIPPPKFKHAALKF

SEQ ID NO: 174 - protein, 20 aa, Artificial
  Short Peptide
RKKKLLKIPPPKFKHAALKF

SEQ ID NO: 175 - protein, 20 aa, Artificial
  Short Peptide
FKKKLLKIPPPKFKHAALKF

SEQ ID NO: 176 - protein, 20 aa, Artificial
  Short Peptide
KWKKLLKIPPPKFKHAALKF

SEQ ID NO: 177 - protein, 20 aa, Artificial
  Short Peptide
RWKKLLKIPPPKFKHAALKF

SEQ ID NO: 178 - protein, 20 aa, Artificial
  Short Peptide
FWKKLLKIPPPKFKHAALKF

SEQ ID NO: 179 - protein, 20 aa, Artificial
  Short Peptide
KKKLFKKIPPPKFKHAALKF

SEQ ID NO: 180 - protein, 20 aa, Artificial
  Short Peptide
RKKLFKKIPPPKFKHAALKF

SEQ ID NO: 181 - protein, 20 aa, Artificial
  Short Peptide
FKKLFKKIPPPKFKHAALKF

SEQ ID NO: 182 - protein, 20 aa, Artificial
  Short Peptide
KWKLFKKIPPPKFKHAALKF

SEQ ID NO: 183 - protein, 20 aa, Artificial
  Short Peptide
RWKLFKKIPPPKFKHAALKF

SEQ ID NO: 184 - protein, 20 aa, Artificial
  Short Peptide
FWKLFKKIPPPKFKHAALKF

SEQ ID NO: 185 - protein, 20 aa, Artificial
  Short Peptide
KKKKFKKIPPPKFKHAALKF

SEQ ID NO: 186 - protein, 20 aa, Artificial
  Short Peptide
RKKKFKKIPPPKFKHAALKF

SEQ ID NO: 187 - protein, 20 aa, Artificial
  Short Peptide
FKKKFKKIPPPKFKHAALKF

SEQ ID NO: 188 - protein, 20 aa, Artificial
  Short Peptide
KWKKFKKIPPPKFKHAALKF

SEQ ID NO: 189 - protein, 20 aa, Artificial
  Short Peptide
RWKKFKKIPPPKFKHAALKF

SEQ ID NO: 190 - protein, 20 aa, Artificial
  Short Peptide
FWKKFKKIPPPKFKHAALKF

SEQ ID NO: 191 - protein, 20 aa, Artificial
  Short Peptide
KKKLLKKIPPPKFKHAALKF

SEQ ID NO: 192 - protein, 20 aa, Artificial
  Short Peptide
RKKLLKKIPPPKFKHAALKF

SEQ ID NO: 193 - protein, 20 aa, Artificial
  Short Peptide
FKKLLKKIPPPKFKHAALKF

SEQ ID NO: 194 - protein, 20 aa, Artificial
  Short Peptide
KWKLLKKIPPPKFKHAALKF

SEQ ID NO: 195 - protein, 20 aa, Artificial
  Short Peptide
RWKLLKKIPPPKFKHAALKF

SEQ ID NO: 196 - protein, 20 aa, Artificial
  Short Peptide
FWKLLKKIPPPKFKHAALKF

SEQ ID NO: 197 - protein, 20 aa, Artificial
  Short Peptide
KKKKLKKIPPPKFKHAALKF

SEQ ID NO: 198 - protein, 20 aa, Artificial
  Short Peptide
RKKKLKKIPPPKFKHAALKF

SEQ ID NO: 199 - protein, 20 aa, Artificial
  Short Peptide
FKKKLKKIPPPKFKHAALKF

SEQ ID NO: 200 - protein, 20 aa, Artificial
  Short Peptide
KWKKLKKIPPPKFKHAALKF

SEQ ID NO: 201 - protein, 20 aa, Artificial
  Short Peptide
RWKKLKKIPPPKFKHAALKF

SEQ ID NO: 202 - protein, 20 aa, Artificial
  Short Peptide
FWKKLKKIPPPKFKHAALKF

SEQ ID NO: 203 - protein, 19 aa, Artificial
  Short Peptide
KKKLFLKIPPKFKHAALKF

SEQ ID NO: 204 - protein, 19 aa, Artificial
  Short Peptide
RKKLFLKIPPKFKHAALKF

SEQ ID NO: 205 - protein, 19 aa, Artificial
  Short Peptide
FKKLFLKIPPKFKHAALKF

SEQ ID NO: 206 - protein, 19 aa, Artificial
  Short Peptide
KWKLFLKIPPKFKHAALKF

SEQ ID NO: 207 - protein, 19 aa, Artificial
  Short Peptide
RWKLFLKIPPKFKHAALKF

SEQ ID NO: 208 - protein, 19 aa, Artificial
  Short Peptide
FWKLFLKIPPKFKHAALKF

SEQ ID NO: 209 - protein, 19 aa, Artificial
  Short Peptide
KKKKFLKIPPKFKHAALKF

SEQ ID NO: 210 - protein, 19 aa, Artificial
  Short Peptide
RKKKFLKIPPKFKHAALKF

SEQ ID NO: 211 - protein, 19 aa, Artificial
  Short Peptide
FKKKFLKIPPKFKHAALKF

SEQ ID NO: 212 - protein, 19 aa, Artificial
  Short Peptide
KWKKFLKIPPKFKHAALKF

SEQ ID NO: 213 - protein, 19 aa, Artificial
  Short Peptide
RWKKFLKIPPKFKHAALKF

SEQ ID NO: 214 - protein, 19 aa, Artificial
  Short Peptide
FWKKFLKIPPKFKHAALKF

SEQ ID NO: 215 - protein, 19 aa, Artificial
  Short Peptide
KKKLLLKIPPKFKHAALKF

SEQ ID NO: 216 - protein, 19 aa, Artificial
  Short Peptide
RKKLLLKIPPKFKHAALKF

SEQ ID NO: 217 - protein, 19 aa, Artificial
  Short Peptide
FKKLLLKIPPKFKHAALKF

SEQ ID NO: 218 - protein, 19 aa, Artificial
  Short Peptide
KWKLLLKIPPKFKHAALKF

SEQ ID NO: 219 - protein, 19 aa, Artificial
  Short Peptide
RWKLLLKIPPKFKHAALKF

SEQ ID NO: 220 - protein, 19 aa, Artificial
  Short Peptide
FWKLLLKIPPKFKHAALKF

SEQ ID NO: 221 - protein, 19 aa, Artificial
  Short Peptide
KKKKLLKIPPKFKHAALKF

SEQ ID NO: 222 - protein, 19 aa, Artificial
  Short Peptide
RKKKLLKIPPKFKHAALKF

SEQ ID NO: 223 - protein, 19 aa, Artificial
  Short Peptide
FKKKLLKIPPKFKHAALKF

SEQ ID NO: 224 - protein, 19 aa, Artificial
  Short Peptide
KWKKLLKIPPKFKHAALKF

SEQ ID NO: 225 - protein, 19 aa, Artificial
  Short Peptide
RWKKLLKIPPKFKHAALKF

SEQ ID NO: 226 - protein, 19 aa, Artificial
  Short Peptide
FWKKLLKIPPKFKHAALKF

SEQ ID NO: 227 - protein, 19 aa, Artificial
  Short Peptide
KKKLFKKIPPKFKHAALKF

SEQ ID NO: 228 - protein, 19 aa, Artificial
  Short Peptide
RKKLFKKIPPKFKHAALKF

SEQ ID NO: 229 - protein, 19 aa, Artificial
  Short Peptide
FKKLFKKIPPKFKHAALKF

SEQ ID NO: 230 - protein, 19 aa, Artificial
  Short Peptide
KWKLFKKIPPKFKHAALKF

SEQ ID NO: 231 - protein, 19 aa, Artificial
  Short Peptide
RWKLFKKIPPKFKHAALKF

SEQ ID NO: 232 - protein, 19 aa, Artificial
  Short Peptide
FWKLFKKIPPKFKHAALKF

SEQ ID NO: 233 - protein, 19 aa, Artificial
  Short Peptide
KKKKFKKIPPKFKHAALKF

SEQ ID NO: 234 - protein, 19 aa, Artificial
  Short Peptide
RKKKFKKIPPKFKHAALKF

SEQ ID NO: 235 - protein, 19 aa, Artificial
  Short Peptide
FKKKFKKIPPKFKHAALKF

SEQ ID NO: 236 - protein, 19 aa, Artificial
  Short Peptide
KWKKFKKIPPKFKHAALKF

SEQ ID NO: 237 - protein, 19 aa, Artificial
  Short Peptide
RWKKFKKIPPKFKHAALKF

SEQ ID NO: 238 - protein, 19 aa, Artificial
  Short Peptide
FWKKFKKIPPKFKHAALKF

SEQ ID NO: 239 - protein, 19 aa, Artificial
  Short Peptide
KKKLLKKIPPKFKHAALKF

SEQ ID NO: 240 - protein, 19 aa, Artificial
  Short Peptide
RKKLLKKIPPKFKHAALKF

SEQ ID NO: 241 - protein, 19 aa, Artificial
  Short Peptide
FKKLLKKIPPKFKHAALKF

SEQ ID NO: 242 - protein, 19 aa, Artificial
  Short Peptide
KWKLLKKIPPKFKHAALKF

SEQ ID NO: 243 - protein, 19 aa, Artificial
  Short Peptide
RWKLLKKIPPKFKHAALKF

SEQ ID NO: 244 - protein, 19 aa, Artificial
  Short Peptide
FWKLLKKIPPKFKHAALKF

SEQ ID NO: 245 - protein, 19 aa, Artificial
  Short Peptide
KKKKLKKIPPKFKHAALKF

SEQ ID NO: 246 - protein, 19 aa, Artificial
  Short Peptide
RKKKLKKIPPKFKHAALKF

SEQ ID NO: 247 - protein, 19 aa, Artificial
  Short Peptide
FKKKLKKIPPKFKHAALKF

SEQ ID NO: 248 - protein, 19 aa, Artificial
  Short Peptide
KWKKLKKIPPKFKHAALKF

SEQ ID NO: 249 - protein, 19 aa, Artificial
  Short Peptide
RWKKLKKIPPKFKHAALKF

SEQ ID NO: 250 - protein, 19 aa, Artificial
  Short Peptide
FWKKLKKIPPKFKHAALKF

SEQ ID NO: 251 - protein, 18 aa, Artificial
  Short Peptide
KKKLFLKIPKFKHAALKF

SEQ ID NO: 252 - protein, 18 aa, Artificial
  Short Peptide
RKKLFLKIPKFKHAALKF

SEQ ID NO: 253 - protein, 18 aa, Artificial
  Short Peptide
FKKLFLKIPKFKHAALKF

SEQ ID NO: 254 - protein, 18 aa, Artificial
  Short Peptide
KWKLFLKIPKFKHAALKF

SEQ ID NO: 255 - protein, 18 aa, Artificial
  Short Peptide
RWKLFLKIPKFKHAALKF

SEQ ID NO: 256 - protein, 18 aa, Artificial
  Short Peptide
FWKLFLKIPKFKHAALKF

SEQ ID NO: 257 - protein, 18 aa, Artificial
  Short Peptide
KKKKFLKIPKFKHAALKF

SEQ ID NO: 258 - protein, 18 aa, Artificial
  Short Peptide
RKKKFLKIPKFKHAALKF

SEQ ID NO: 259 - protein, 18 aa, Artificial
  Short Peptide
FKKKFLKIPKFKHAALKF

SEQ ID NO: 260 - protein, 18 aa, Artificial
  Short Peptide
KWKKFLKIPKFKHAALKF

SEQ ID NO: 261 - protein, 18 aa, Artificial
  Short Peptide
RWKKFLKIPKFKHAALKF

SEQ ID NO: 262 - protein, 18 aa, Artificial
  Short Peptide
FWKKFLKIPKFKHAALKF

SEQ ID NO: 263 - protein, 18 aa, Artificial
  Short Peptide
KKKLLLKIPKFKHAALKF

SEQ ID NO: 264 - protein, 18 aa, Artificial
  Short Peptide
RKKLLLKIPKFKHAALKF

SEQ ID NO: 265 - protein, 18 aa, Artificial
  Short Peptide
FKKLLLKIPKFKHAALKF

SEQ ID NO: 266 - protein, 18 aa, Artificial
  Short Peptide
KWKLLLKIPKFKHAALKF

SEQ ID NO: 267 - protein, 18 aa, Artificial
  Short Peptide
RWKLLLKIPKFKHAALKF

SEQ ID NO: 268 - protein, 18 aa, Artificial
  Short Peptide
FWKLLLKIPKFKHAALKF

SEQ ID NO: 269 - protein, 18 aa, Artificial
  Short Peptide
KKKKLLKIPKFKHAALKF

SEQ ID NO: 270 - protein, 18 aa, Artificial
  Short Peptide
RKKKLLKIPKFKHAALKF

SEQ ID NO: 271 - protein, 18 aa, Artificial
  Short Peptide
FKKKLLKIPKFKHAALKF

SEQ ID NO: 272 - protein, 18 aa, Artificial
  Short Peptide
KWKKLLKIPKFKHAALKF

SEQ ID NO: 273 - protein, 18 aa, Artificial
  Short Peptide
RWKKLLKIPKFKHAALKF

SEQ ID NO: 274 - protein, 18 aa, Artificial
  Short Peptide
FWKKLLKIPKFKHAALKF

SEQ ID NO: 275 - protein, 18 aa, Artificial
  Short Peptide
KKKLFKKIPKFKHAALKF

SEQ ID NO: 276 - protein, 18 aa, Artificial
  Short Peptide
RKKLFKKIPKFKHAALKF

SEQ ID NO: 277 - protein, 18 aa, Artificial
  Short Peptide
FKKLFKKIPKFKHAALKF

SEQ ID NO: 278 - protein, 18 aa, Artificial
  Short Peptide
KWKLFKKIPKFKHAALKF

SEQ ID NO: 279 - protein, 18 aa, Artificial
  Short Peptide
RWKLFKKIPKFKHAALKF

SEQ ID NO: 280 - protein, 18 aa, Artificial
  Short Peptide
FWKLFKKIPKFKHAALKF

SEQ ID NO: 281 - protein, 18 aa, Artificial
  Short Peptide
KKKKFKKIPKFKHAALKF

SEQ ID NO: 282 - protein, 18 aa, Artificial
  Short Peptide
RKKKFKKIPKFKHAALKF

SEQ ID NO: 283 - protein, 18 aa, Artificial
  Short Peptide
FKKKFKKIPKFKHAALKF

SEQ ID NO: 284 - protein, 18 aa, Artificial
  Short Peptide
KWKKFKKIPKFKHAALKF

SEQ ID NO: 285 - protein, 18 aa, Artificial
  Short Peptide
RWKKFKKIPKFKHAALKF

SEQ ID NO: 286 - protein, 18 aa, Artificial
  Short Peptide
FWKKFKKIPKFKHAALKF

SEQ ID NO: 287 - protein, 18 aa, Artificial
  Short Peptide
KKKLLKKIPKFKHAALKF

SEQ ID NO: 288 - protein, 18 aa, Artificial
  Short Peptide
RKKLLKKIPKFKHAALKF

SEQ ID NO: 289 - protein, 18 aa, Artificial
  Short Peptide
FKKLLKKIPKFKHAALKF

SEQ ID NO: 290 - protein, 18 aa, Artificial
  Short Peptide
KWKLLKKIPKFKHAALKF

SEQ ID NO: 291 - protein, 18 aa, Artificial
  Short Peptide
RWKLLKKIPKFKHAALKF

SEQ ID NO: 292 - protein, 18 aa, Artificial
  Short Peptide
FWKLLKKIPKFKHAALKF

SEQ ID NO: 293 - protein, 18 aa, Artificial
  Short Peptide
KKKKLKKIPKFKHAALKF

SEQ ID NO: 294 - protein, 18 aa, Artificial
  Short Peptide
RKKKLKKIPKFKHAALKF

SEQ ID NO: 295 - protein, 18 aa, Artificial
  Short Peptide
FKKKLKKIPKFKHAALKF

SEQ ID NO: 296 - protein, 18 aa, Artificial
  Short Peptide
KWKKLKKIPKFKHAALKF

SEQ ID NO: 297 - protein, 18 aa, Artificial
  Short Peptide
RWKKLKKIPKFKHAALKF

SEQ ID NO: 298 - protein, 18 aa, Artificial
  Short Peptide
FWKKLKKIPKFKHAALKF

SEQ ID NO: 299 - protein, 20 aa, Artificial
  Short Peptide
KKKLFLKIPPPKFLKAALKF

SEQ ID NO: 300 - protein, 20 aa, Artificial
  Short Peptide
RKKLFLKIPPPKFLKAALKF

SEQ ID NO: 301 - protein, 20 aa, Artificial
  Short Peptide
FKKLFLKIPPPKFLKAALKF

SEQ ID NO: 302 - protein, 20 aa, Artificial
  Short Peptide
KWKLFLKIPPPKFLKAALKF

SEQ ID NO: 303 - protein, 20 aa, Artificial
  Short Peptide
RWKLFLKIPPPKFLKAALKF

SEQ ID NO: 304 - protein, 20 aa, Artificial
  Short Peptide
FWKLFLKIPPPKFLKAALKF

SEQ ID NO: 305 - protein, 20 aa, Artificial
  Short Peptide
KKKKFLKIPPPKFLKAALKF

SEQ ID NO: 306 - protein, 20 aa, Artificial
  Short Peptide
RKKKFLKIPPPKFLKAALKF

SEQ ID NO: 307 - protein, 20 aa, Artificial
  Short Peptide
FKKKFLKIPPPKFLKAALKF

SEQ ID NO: 308 - protein, 20 aa, Artificial
  Short Peptide
KWKKFLKIPPPKFLKAALKF

SEQ ID NO: 309 - protein, 20 aa, Artificial
  Short Peptide
RWKKFLKIPPPKFLKAALKF

SEQ ID NO: 310 - protein, 20 aa, Artificial
  Short Peptide
FWKKFLKIPPPKFLKAALKF

SEQ ID NO: 311 - protein, 20 aa, Artificial
  Short Peptide
KKKLLLKIPPPKFLKAALKF

SEQ ID NO: 312 - protein, 20 aa, Artificial
  Short Peptide
RKKLLLKIPPPKFLKAALKF

SEQ ID NO: 313 - protein, 20 aa, Artificial
  Short Peptide
FKKLLLKIPPPKFLKAALKF

SEQ ID NO: 314 - protein, 20 aa, Artificial
  Short Peptide
KWKLLLKIPPPKFLKAALKF

SEQ ID NO: 315 - protein, 20 aa, Artificial
  Short Peptide
RWKLLLKIPPPKFLKAALKF

SEQ ID NO: 316 - protein, 20 aa, Artificial
  Short Peptide
FWKLLLKIPPPKFLKAALKF

SEQ ID NO: 317 - protein, 20 aa, Artificial
  Short Peptide
KKKKLLKIPPPKFLKAALKF

SEQ ID NO: 318 - protein, 20 aa, Artificial
  Short Peptide
RKKKLLKIPPPKFLKAALKF

SEQ ID NO: 319 - protein, 20 aa, Artificial
  Short Peptide
FKKKLLKIPPPKFLKAALKF

SEQ ID NO: 320 - protein, 20 aa, Artificial
  Short Peptide
KWKKLLKIPPPKFLKAALKF

SEQ ID NO: 321 - protein, 20 aa, Artificial
  Short Peptide
RWKKLLKIPPPKFLKAALKF

SEQ ID NO: 322 - protein, 20 aa, Artificial
  Short Peptide
FWKKLLKIPPPKFLKAALKF

SEQ ID NO: 323 - protein, 20 aa, Artificial
  Short Peptide
KKKLFKKIPPPKFLKAALKF

SEQ ID NO: 324 - protein, 20 aa, Artificial
  Short Peptide
RKKLFKKIPPPKFLKAALKF

SEQ ID NO: 325 - protein, 20 aa, Artificial
  Short Peptide
FKKLFKKIPPPKFLKAALKF

SEQ ID NO: 326 - protein, 20 aa, Artificial
  Short Peptide
KWKLFKKIPPPKFLKAALKF

SEQ ID NO: 327 - protein, 20 aa, Artificial
  Short Peptide
RWKLFKKIPPPKFLKAALKF

SEQ ID NO: 328 - protein, 20 aa, Artificial
  Short Peptide
FWKLFKKIPPPKFLKAALKF

SEQ ID NO: 329 - protein, 20 aa, Artificial
  Short Peptide
KKKKFKKIPPPKFLKAALKF

SEQ ID NO: 330 - protein, 20 aa, Artificial
  Short Peptide
RKKKFKKIPPPKFLKAALKF

SEQ ID NO: 331 - protein, 20 aa, Artificial
  Short Peptide
FKKKFKKIPPPKFLKAALKF

SEQ ID NO: 332 - protein, 20 aa, Artificial
  Short Peptide
KWKKFKKIPPPKFLKAALKF

SEQ ID NO: 333 - protein, 20 aa, Artificial
  Short Peptide
RWKKFKKIPPPKFLKAALKF

SEQ ID NO: 334 - protein, 20 aa, Artificial
  Short Peptide
FWKKFKKIPPPKFLKAALKF

SEQ ID NO: 335 - protein, 20 aa, Artificial
  Short Peptide
KKKLLKKIPPPKFLKAALKF

SEQ ID NO: 336 - protein, 20 aa, Artificial
  Short Peptide
RKKLLKKIPPPKFLKAALKF

SEQ ID NO: 337 - protein, 20 aa, Artificial
  Short Peptide
FKKLLKKIPPPKFLKAALKF

SEQ ID NO: 338 - protein, 20 aa, Artificial
  Short Peptide
KWKLLKKIPPPKFLKAALKF

SEQ ID NO: 339 - protein, 20 aa, Artificial
  Short Peptide
RWKLLKKIPPPKFLKAALKF

SEQ ID NO: 340 - protein, 20 aa, Artificial
  Short Peptide
FWKLLKKIPPPKFLKAALKF

SEQ ID NO: 341 - protein, 20 aa, Artificial
  Short Peptide
KKKKLKKIPPPKFLKAALKF

SEQ ID NO: 342 - protein, 20 aa, Artificial
  Short Peptide
RKKKLKKIPPPKFLKAALKF

SEQ ID NO: 343 - protein, 20 aa, Artificial
  Short Peptide
FKKKLKKIPPPKFLKAALKF

SEQ ID NO: 344 - protein, 20 aa, Artificial
  Short Peptide
KWKKLKKIPPPKFLKAALKF

SEQ ID NO: 345 - protein, 20 aa, Artificial
  Short Peptide
RWKKLKKIPPPKFLKAALKF

SEQ ID NO: 346 - protein, 20 aa, Artificial
  Short Peptide
FWKKLKKIPPPKFLKAALKF

SEQ ID NO: 347 - protein, 19 aa, Artificial
  Short Peptide
KKKLFLKIPPKFLKAALKF

SEQ ID NO: 348 - protein, 19 aa, Artificial
  Short Peptide
RKKLFLKIPPKFLKAALKF

SEQ ID NO: 349 - protein, 19 aa, Artificial
  Short Peptide
FKKLFLKIPPKFLKAALKF

SEQ ID NO: 350 - protein, 19 aa, Artificial
  Short Peptide
KWKLFLKIPPKFLKAALKF

SEQ ID NO: 351 - protein, 19 aa, Artificial
  Short Peptide
RWKLFLKIPPKFLKAALKF

SEQ ID NO: 352 - protein, 19 aa, Artificial
  Short Peptide
FWKLFLKIPPKFLKAALKF

SEQ ID NO: 353 - protein, 19 aa, Artificial
  Short Peptide
KKKKFLKIPPKFLKAALKF

SEQ ID NO: 354 - protein, 19 aa, Artificial
  Short Peptide
RKKKFLKIPPKFLKAALKF

SEQ ID NO: 355 - protein, 19 aa, Artificial
  Short Peptide
FKKKFLKIPPKFLKAALKF

SEQ ID NO: 356 - protein, 19 aa, Artificial
  Short Peptide
KWKKFLKIPPKFLKAALKF

SEQ ID NO: 357 - protein, 19 aa, Artificial
  Short Peptide
RWKKFLKIPPKFLKAALKF

SEQ ID NO: 358 - protein, 19 aa, Artificial
  Short Peptide
FWKKFLKIPPKFLKAALKF

SEQ ID NO: 359 - protein, 19 aa, Artificial
  Short Peptide
KKKLLLKIPPKFLKAALKF

SEQ ID NO: 360 - protein, 19 aa, Artificial
  Short Peptide
RKKLLLKIPPKFLKAALKF

SEQ ID NO: 361 - protein, 19 aa, Artificial
  Short Peptide
FKKLLLKIPPKFLKAALKF

SEQ ID NO: 362 - protein, 19 aa, Artificial
  Short Peptide
KWKLLLKIPPKFLKAALKF

SEQ ID NO: 363 - protein, 19 aa, Artificial
  Short Peptide
RWKLLLKIPPKFLKAALKF

SEQ ID NO: 364 - protein, 19 aa, Artificial
  Short Peptide
FWKLLLKIPPKFLKAALKF

SEQ ID NO: 365 - protein, 19 aa, Artificial
  Short Peptide
KKKKLLKIPPKFLKAALKF

SEQ ID NO: 366 - protein, 19 aa, Artificial
  Short Peptide
RKKKLLKIPPKFLKAALKF

SEQ ID NO: 367 - protein, 19 aa, Artificial
  Short Peptide
FKKKLLKIPPKFLKAALKF

SEQ ID NO: 368 - protein, 19 aa, Artificial
  Short Peptide
KWKKLLKIPPKFLKAALKF

SEQ ID NO: 369 - protein, 19 aa, Artificial
  Short Peptide
RWKKLLKIPPKFLKAALKF

SEQ ID NO: 370 - protein, 19 aa, Artificial
  Short Peptide
FWKKLLKIPPKFLKAALKF

SEQ ID NO: 371 - protein, 19 aa, Artificial
  Short Peptide
KKKLFKKIPPKFLKAALKF

SEQ ID NO: 372 - protein, 19 aa, Artificial
  Short Peptide
RKKLFKKIPPKFLKAALKF

SEQ ID NO: 373 - protein, 19 aa, Artificial
  Short Peptide
FKKLFKKIPPKFLKAALKF

SEQ ID NO: 374 - protein, 19 aa, Artificial
  Short Peptide
KWKLFKKIPPKFLKAALKF

SEQ ID NO: 375 - protein, 19 aa, Artificial
  Short Peptide
RWKLFKKIPPKFLKAALKF

SEQ ID NO: 376 - protein, 19 aa, Artificial
  Short Peptide
FWKLFKKIPPKFLKAALKF

SEQ ID NO: 377 - protein, 19 aa, Artificial
  Short Peptide
KKKKFKKIPPKFLKAALKF

SEQ ID NO: 378 - protein, 19 aa, Artificial
  Short Peptide
RKKKFKKIPPKFLKAALKF

SEQ ID NO: 379 - protein, 19 aa, Artificial
  Short Peptide
FKKKFKKIPPKFLKAALKF

SEQ ID NO: 380 - protein, 19 aa, Artificial
  Short Peptide
KWKKFKKIPPKFLKAALKF

SEQ ID NO: 381 - protein, 19 aa, Artificial
  Short Peptide
RWKKFKKIPPKFLKAALKF

SEQ ID NO: 382 - protein, 19 aa, Artificial
  Short Peptide
FWKKFKKIPPKFLKAALKF

SEQ ID NO: 383 - protein, 19 aa, Artificial
  Short Peptide
KKKLLKKIPPKFLKAALKF

SEQ ID NO: 384 - protein, 19 aa, Artificial
  Short Peptide
RKKLLKKIPPKFLKAALKF

SEQ ID NO: 385 - protein, 19 aa, Artificial
  Short Peptide
FKKLLKKIPPKFLKAALKF

SEQ ID NO: 386 - protein, 19 aa, Artificial
  Short Peptide
KWKLLKKIPPKFLKAALKF

SEQ ID NO: 387 - protein, 19 aa, Artificial
  Short Peptide
RWKLLKKIPPKFLKAALKF

SEQ ID NO: 388 - protein, 19 aa, Artificial
  Short Peptide
FWKLLKKIPPKFLKAALKF

SEQ ID NO: 389 - protein, 19 aa, Artificial
  Short Peptide
KKKKLKKIPPKFLKAALKF

SEQ ID NO: 390 - protein, 19 aa, Artificial
  Short Peptide
RKKKLKKIPPKFLKAALKF

SEQ ID NO: 391 - protein, 19 aa, Artificial
  Short Peptide
FKKKLKKIPPKFLKAALKF

SEQ ID NO: 392 - protein, 19 aa, Artificial
  Short Peptide
KWKKLKKIPPKFLKAALKF

SEQ ID NO: 393 - protein, 19 aa, Artificial
  Short Peptide
RWKKLKKIPPKFLKAALKF

SEQ ID NO: 394 - protein, 19 aa, Artificial
  Short Peptide
FWKKLKKIPPKFLKAALKF

SEQ ID NO: 395 - protein, 18 aa, Artificial
  Short Peptide
KKKLFLKIPKFLKAALKF

SEQ ID NO: 396 - protein, 18 aa, Artificial
  Short Peptide
RKKLFLKIPKFLKAALKF

SEQ ID NO: 397 - protein, 18 aa, Artificial
  Short Peptide
FKKLFLKIPKFLKAALKF

SEQ ID NO: 398 - protein, 18 aa, Artificial
  Short Peptide
KWKLFLKIPKFLKAALKF

SEQ ID NO: 399 - protein, 18 aa, Artificial
  Short Peptide
RWKLFLKIPKFLKAALKF

SEQ ID NO: 400 - protein, 18 aa, Artificial
  Short Peptide
FWKLFLKIPKFLKAALKF

SEQ ID NO: 401 - protein, 18 aa, Artificial
  Short Peptide
KKKKFLKIPKFLKAALKF

SEQ ID NO: 402 - protein, 18 aa, Artificial
  Short Peptide
RKKKFLKIPKFLKAALKF

SEQ ID NO: 403 - protein, 18 aa, Artificial
  Short Peptide
FKKKFLKIPKFLKAALKF

SEQ ID NO: 404 - protein, 18 aa, Artificial
  Short Peptide
KWKKFLKIPKFLKAALKF

SEQ ID NO: 405 - protein, 18 aa, Artificial
  Short Peptide
RWKKFLKIPKFLKAALKF

SEQ ID NO: 406 - protein, 18 aa, Artificial
  Short Peptide
FWKKFLKIPKFLKAALKF

SEQ ID NO: 407 - protein, 18 aa, Artificial
  Short Peptide
KKKLLLKIPKFLKAALKF

SEQ ID NO: 408 - protein, 18 aa, Artificial
  Short Peptide
RKKLLLKIPKFLKAALKF

SEQ ID NO: 409 - protein, 18 aa, Artificial
  Short Peptide
FKKLLLKIPKFLKAALKF

SEQ ID NO: 410 - protein, 18 aa, Artificial
  Short Peptide
KWKLLLKIPKFLKAALKF

SEQ ID NO: 411 - protein, 18 aa, Artificial
  Short Peptide
RWKLLLKIPKFLKAALKF

SEQ ID NO: 412 - protein, 18 aa, Artificial
  Short Peptide
FWKLLLKIPKFLKAALKF

SEQ ID NO: 413 - protein, 18 aa, Artificial
  Short Peptide
KKKKLLKIPKFLKAALKF

SEQ ID NO: 414 - protein, 18 aa, Artificial
  Short Peptide
RKKKLLKIPKFLKAALKF

SEQ ID NO: 415 - protein, 18 aa, Artificial
  Short Peptide
FKKKLLKIPKFLKAALKF

SEQ ID NO: 416 - protein, 18 aa, Artificial
  Short Peptide
KWKKLLKIPKFLKAALKF

SEQ ID NO: 417 - protein, 18 aa, Artificial
  Short Peptide
RWKKLLKIPKFLKAALKF

SEQ ID NO: 418 - protein, 18 aa, Artificial
  Short Peptide
FWKKLLKIPKFLKAALKF

SEQ ID NO: 419 - protein, 18 aa, Artificial
  Short Peptide
KKKLFKKIPKFLKAALKF

SEQ ID NO: 420 - protein, 18 aa, Artificial
  Short Peptide
RKKLFKKIPKFLKAALKF

SEQ ID NO: 421 - protein, 18 aa, Artificial
  Short Peptide
FKKLFKKIPKFLKAALKF

SEQ ID NO: 422 - protein, 18 aa, Artificial
  Short Peptide
KWKLFKKIPKFLKAALKF

SEQ ID NO: 423 - protein, 18 aa, Artificial
  Short Peptide
RWKLFKKIPKFLKAALKF

SEQ ID NO: 424 - protein, 18 aa, Artificial
  Short Peptide
FWKLFKKIPKFLKAALKF

SEQ ID NO: 425 - protein, 18 aa, Artificial
  Short Peptide
KKKKFKKIPKFLKAALKF

SEQ ID NO: 426 - protein, 18 aa, Artificial
  Short Peptide
RKKKFKKIPKFLKAALKF

SEQ ID NO: 427 - protein, 18 aa, Artificial
  Short Peptide
FKKKFKKIPKFLKAALKF

SEQ ID NO: 428 - protein, 18 aa, Artificial
  Short Peptide
KWKKFKKIPKFLKAALKF

SEQ ID NO: 429 - protein, 18 aa, Artificial
  Short Peptide
RWKKFKKIPKFLKAALKF

SEQ ID NO: 430 - protein, 18 aa, Artificial
  Short Peptide
FWKKFKKIPKFLKAALKF

SEQ ID NO: 431 - protein, 18 aa, Artificial
  Short Peptide
KKKLLKKIPKFLKAALKF

SEQ ID NO: 432 - protein, 18 aa, Artificial
  Short Peptide
RKKLLKKIPKFLKAALKF

SEQ ID NO: 433 - protein, 18 aa, Artificial
  Short Peptide
FKKLLKKIPKFLKAALKF

SEQ ID NO: 434 - protein, 18 aa, Artificial
  Short Peptide
KWKLLKKIPKFLKAALKF

SEQ ID NO: 435 - protein, 18 aa, Artificial
  Short Peptide
RWKLLKKIPKFLKAALKF

SEQ ID NO: 436 - protein, 18 aa, Artificial
  Short Peptide
FWKLLKKIPKFLKAALKF

SEQ ID NO: 437 - protein, 18 aa, Artificial
  Short Peptide
KKKKLKKIPKFLKAALKF

SEQ ID NO: 438 - protein, 18 aa, Artificial
  Short Peptide
RKKKLKKIPKFLKAALKF

SEQ ID NO: 439 - protein, 18 aa, Artificial
  Short Peptide
FKKKLKKIPKFLKAALKF

SEQ ID NO: 440 - protein, 18 aa, Artificial
  Short Peptide
KWKKLKKIPKFLKAALKF

SEQ ID NO: 441 - protein, 18 aa, Artificial
  Short Peptide
RWKKLKKIPKFLKAALKF

SEQ ID NO: 442 - protein, 18 aa, Artificial
  Short Peptide
FWKKLKKIPKFLKAALKF

SEQ ID NO: 443 - protein, 20 aa, Artificial
  Short Peptide
KKKLFLKIPPPKFKKAALKF

SEQ ID NO: 444 - protein, 20 aa, Artificial
  Short Peptide
RKKLFLKIPPPKFKKAALKF

SEQ ID NO: 445 - protein, 20 aa, Artificial
  Short Peptide
FKKLFLKIPPPKFKKAALKF

SEQ ID NO: 446 - protein, 20 aa, Artificial
  Short Peptide
KWKLFLKIPPPKFKKAALKF

SEQ ID NO: 447 - protein, 20 aa, Artificial
  Short Peptide
RWKLFLKIPPPKFKKAALKF

SEQ ID NO: 448 - protein, 20 aa, Artificial
  Short Peptide
FWKLFLKIPPPKFKKAALKF

SEQ ID NO: 449 - protein, 20 aa, Artificial
  Short Peptide
KKKKFLKIPPPKFKKAALKF

SEQ ID NO: 450 - protein, 20 aa, Artificial
  Short Peptide
RKKKFLKIPPPKFKKAALKF

SEQ ID NO: 451 - protein, 20 aa, Artificial
  Short Peptide
FKKKFLKIPPPKFKKAALKF

SEQ ID NO: 452 - protein, 20 aa, Artificial
  Short Peptide
KWKKFLKIPPPKFKKAALKF

SEQ ID NO: 453 - protein, 20 aa, Artificial
  Short Peptide
RWKKFLKIPPPKFKKAALKF

SEQ ID NO: 454 - protein, 20 aa, Artificial
  Short Peptide
FWKKFLKIPPPKFKKAALKF

SEQ ID NO: 455 - protein, 20 aa, Artificial
  Short Peptide
KKKLLLKIPPPKFKKAALKF

SEQ ID NO: 456 - protein, 20 aa, Artificial
  Short Peptide
RKKLLLKIPPPKFKKAALKF

SEQ ID NO: 457 - protein, 20 aa, Artificial
  Short Peptide
FKKLLLKIPPPKFKKAALKF

SEQ ID NO: 458 - protein, 20 aa, Artificial
  Short Peptide
KWKLLLKIPPPKFKKAALKF

SEQ ID NO: 459 - protein, 20 aa, Artificial
  Short Peptide
RWKLLLKIPPPKFKKAALKF

SEQ ID NO: 460 - protein, 20 aa, Artificial
  Short Peptide
FWKLLLKIPPPKFKKAALKF

SEQ ID NO: 461 - protein, 20 aa, Artificial
  Short Peptide
KKKKLLKIPPPKFKKAALKF

SEQ ID NO: 462 - protein, 20 aa, Artificial
  Short Peptide
RKKKLLKIPPPKFKKAALKF

SEQ ID NO: 463 - protein, 20 aa, Artificial
  Short Peptide
FKKKLLKIPPPKFKKAALKF

SEQ ID NO: 464 - protein, 20 aa, Artificial
  Short Peptide
KWKKLLKIPPPKFKKAALKF

SEQ ID NO: 465 - protein, 20 aa, Artificial
  Short Peptide
RWKKLLKIPPPKFKKAALKF

SEQ ID NO: 466 - protein, 20 aa, Artificial
  Short Peptide
FWKKLLKIPPPKFKKAALKF

SEQ ID NO: 467 - protein, 20 aa, Artificial
  Short Peptide
KKKLFKKIPPPKFKKAALKF

SEQ ID NO: 468 - protein, 20 aa, Artificial
  Short Peptide
RKKLFKKIPPPKFKKAALKF

SEQ ID NO: 469 - protein, 20 aa, Artificial
  Short Peptide
FKKLFKKIPPPKFKKAALKF

SEQ ID NO: 470 - protein, 20 aa, Artificial
  Short Peptide
KWKLFKKIPPPKFKKAALKF

SEQ ID NO: 471 - protein, 20 aa, Artificial
  Short Peptide
RWKLFKKIPPPKFKKAALKF

SEQ ID NO: 472 - protein, 20 aa, Artificial
  Short Peptide
FWKLFKKIPPPKFKKAALKF

SEQ ID NO: 473 - protein, 20 aa, Artificial
  Short Peptide
KKKKFKKIPPPKFKKAALKF

SEQ ID NO: 474 - protein, 20 aa, Artificial
  Short Peptide
RKKKFKKIPPPKFKKAALKF

SEQ ID NO: 475 - protein, 20 aa, Artificial
  Short Peptide
FKKKFKKIPPPKFKKAALKF

SEQ ID NO: 476 - protein, 20 aa, Artificial
  Short Peptide
KWKKFKKIPPPKFKKAALKF

SEQ ID NO: 477 - protein, 20 aa, Artificial
  Short Peptide
RWKKFKKIPPPKFKKAALKF

SEQ ID NO: 478 - protein, 20 aa, Artificial
  Short Peptide
FWKKFKKIPPPKFKKAALKF

SEQ ID NO: 479 - protein, 20 aa, Artificial
  Short Peptide
KKKLLKKIPPPKFKKAALKF

SEQ ID NO: 480 - protein, 20 aa, Artificial
  Short Peptide
RKKLLKKIPPPKFKKAALKF

SEQ ID NO: 481 - protein, 20 aa, Artificial
  Short Peptide
FKKLLKKIPPPKFKKAALKF

SEQ ID NO: 482 - protein, 20 aa, Artificial
  Short Peptide
KWKLLKKIPPPKFKKAALKF

SEQ ID NO: 483 - protein, 20 aa, Artificial
  Short Peptide
RWKLLKKIPPPKFKKAALKF

SEQ ID NO: 484 - protein, 20 aa, Artificial
  Short Peptide
FWKLLKKIPPPKFKKAALKF

SEQ ID NO: 485 - protein, 20 aa, Artificial
  Short Peptide
KKKKLKKIPPPKFKKAALKF

SEQ ID NO: 486 - protein, 20 aa, Artificial
  Short Peptide
RKKKLKKIPPPKFKKAALKF

SEQ ID NO: 487 - protein, 20 aa, Artificial
  Short Peptide
FKKKLKKIPPPKFKKAALKF

SEQ ID NO: 488 - protein, 20 aa, Artificial
  Short Peptide
KWKKLKKIPPPKFKKAALKF

SEQ ID NO: 489 - protein, 20 aa, Artificial
  Short Peptide
RWKKLKKIPPPKFKKAALKF

SEQ ID NO: 490 - protein, 20 aa, Artificial
  Short Peptide
FWKKLKKIPPPKFKKAALKF

SEQ ID NO: 491 - protein, 19 aa, Artificial
  Short Peptide
KKKLFLKIPPKFKKAALKF

SEQ ID NO: 492 - protein, 19 aa, Artificial
  Short Peptide
RKKLFLKIPPKFKKAALKF

SEQ ID NO: 493 - protein, 19 aa, Artificial
  Short Peptide
FKKLFLKIPPKFKKAALKF

SEQ ID NO: 494 - protein, 19 aa, Artificial
  Short Peptide
KWKLFLKIPPKFKKAALKF

SEQ ID NO: 495 - protein, 19 aa, Artificial
  Short Peptide
RWKLFLKIPPKFKKAALKF

SEQ ID NO: 496 - protein, 19 aa, Artificial
  Short Peptide
FWKLFLKIPPKFKKAALKF

SEQ ID NO: 497 - protein, 19 aa, Artificial
  Short Peptide
KKKKFLKIPPKFKKAALKF

SEQ ID NO: 498 - protein, 19 aa, Artificial
  Short Peptide
RKKKFLKIPPKFKKAALKF

SEQ ID NO: 499 - protein, 19 aa, Artificial
  Short Peptide
FKKKFLKIPPKFKKAALKF

SEQ ID NO: 500 - protein, 19 aa, Artificial
  Short Peptide
KWKKFLKIPPKFKKAALKF

SEQ ID NO: 501 - protein, 19 aa, Artificial
  Short Peptide
RWKKFLKIPPKFKKAALKF

SEQ ID NO: 502 - protein, 19 aa, Artificial
  Short Peptide
FWKKFLKIPPKFKKAALKF

SEQ ID NO: 503 - protein, 19 aa, Artificial
  Short Peptide
KKKLLLKIPPKFKKAALKF

SEQ ID NO: 504 - protein, 19 aa, Artificial
  Short Peptide
RKKLLLKIPPKFKKAALKF

SEQ ID NO: 505 - protein, 19 aa, Artificial
  Short Peptide
FKKLLLKIPPKFKKAALKF

SEQ ID NO: 506 - protein, 19 aa, Artificial
  Short Peptide
KWKLLLKIPPKFKKAALKF

SEQ ID NO: 507 - protein, 19 aa, Artificial
  Short Peptide
RWKLLLKIPPKFKKAALKF

SEQ ID NO: 508 - protein, 19 aa, Artificial
  Short Peptide
FWKLLLKIPPKFKKAALKF

SEQ ID NO: 509 - protein, 19 aa, Artificial
  Short Peptide
KKKKLLKIPPKFKKAALKF

SEQ ID NO: 510 - protein, 19 aa, Artificial
  Short Peptide
RKKKLLKIPPKFKKAALKF

SEQ ID NO: 511 - protein, 19 aa, Artificial
  Short Peptide
FKKKLLKIPPKFKKAALKF

SEQ ID NO: 512 - protein, 19 aa, Artificial
  Short Peptide
KWKKLLKIPPKFKKAALKF

SEQ ID NO: 513 - protein, 19 aa, Artificial
  Short Peptide
RWKKLLKIPPKFKKAALKF

SEQ ID NO: 514 - protein, 19 aa, Artificial
  Short Peptide
FWKKLLKIPPKFKKAALKF

SEQ ID NO: 515 - protein, 19 aa, Artificial
  Short Peptide
KKKLFKKIPPKFKKAALKF

SEQ ID NO: 516 - protein, 19 aa, Artificial
  Short Peptide
RKKLFKKIPPKFKKAALKF

SEQ ID NO: 517 - protein, 19 aa, Artificial
  Short Peptide
FKKLFKKIPPKFKKAALKF

SEQ ID NO: 518 - protein, 19 aa, Artificial
  Short Peptide
KWKLFKKIPPKFKKAALKF

SEQ ID NO: 519 - protein, 19 aa, Artificial
  Short Peptide
RWKLFKKIPPKFKKAALKF

SEQ ID NO: 520 - protein, 19 aa, Artificial
  Short Peptide
FWKLFKKIPPKFKKAALKF

SEQ ID NO: 521 - protein, 19 aa, Artificial
  Short Peptide
KKKKFKKIPPKFKKAALKF

SEQ ID NO: 522 - protein, 19 aa, Artificial
  Short Peptide
RKKKFKKIPPKFKKAALKF

SEQ ID NO: 523 - protein, 19 aa, Artificial
  Short Peptide
FKKKFKKIPPKFKKAALKF

SEQ ID NO: 524 - protein, 19 aa, Artificial
  Short Peptide
KWKKFKKIPPKFKKAALKF

SEQ ID NO: 525 - protein, 19 aa, Artificial
  Short Peptide
RWKKFKKIPPKFKKAALKF

SEQ ID NO: 526 - protein, 19 aa, Artificial
  Short Peptide
FWKKFKKIPPKFKKAALKF

SEQ ID NO: 527 - protein, 19 aa, Artificial
  Short Peptide
KKKLLKKIPPKFKKAALKF

SEQ ID NO: 528 - protein, 19 aa, Artificial
  Short Peptide
RKKLLKKIPPKFKKAALKF

SEQ ID NO: 529 - protein, 19 aa, Artificial
  Short Peptide
FKKLLKKIPPKFKKAALKF

SEQ ID NO: 530 - protein, 19 aa, Artificial
  Short Peptide
KWKLLKKIPPKFKKAALKF

SEQ ID NO: 531 - protein, 19 aa, Artificial
  Short Peptide
RWKLLKKIPPKFKKAALKF

SEQ ID NO: 532 - protein, 19 aa, Artificial
  Short Peptide
FWKLLKKIPPKFKKAALKF

SEQ ID NO: 533 - protein, 19 aa, Artificial
  Short Peptide
KKKKLKKIPPKFKKAALKF

SEQ ID NO: 534 - protein, 19 aa, Artificial
  Short Peptide
RKKKLKKIPPKFKKAALKF

SEQ ID NO: 535 - protein, 19 aa, Artificial
  Short Peptide
FKKKLKKIPPKFKKAALKF

SEQ ID NO: 536 - protein, 19 aa, Artificial
  Short Peptide
KWKKLKKIPPKFKKAALKF

SEQ ID NO: 537 - protein, 19 aa, Artificial
  Short Peptide
RWKKLKKIPPKFKKAALKF

SEQ ID NO: 538 - protein, 19 aa, Artificial
  Short Peptide
FWKKLKKIPPKFKKAALKF

SEQ ID NO: 539 - protein, 18 aa, Artificial
  Short Peptide
KKKLFLKIPKFKKAALKF

SEQ ID NO: 540 - protein, 18 aa, Artificial
  Short Peptide
RKKLFLKIPKFKKAALKF

SEQ ID NO: 541 - protein, 18 aa, Artificial
  Short Peptide
FKKLFLKIPKFKKAALKF

SEQ ID NO: 542 - protein, 18 aa, Artificial
  Short Peptide
KWKLFLKIPKFKKAALKF

SEQ ID NO: 543 - protein, 18 aa, Artificial
  Short Peptide
RWKLFLKIPKFKKAALKF

SEQ ID NO: 544 - protein, 18 aa, Artificial
  Short Peptide
FWKLFLKIPKFKKAALKF

SEQ ID NO: 545 - protein, 18 aa, Artificial
  Short Peptide
KKKKFLKIPKFKKAALKF

SEQ ID NO: 546 - protein, 18 aa, Artificial
  Short Peptide
RKKKFLKIPKFKKAALKF

SEQ ID NO: 547 - protein, 18 aa, Artificial
  Short Peptide
FKKKFLKIPKFKKAALKF

SEQ ID NO: 548 - protein, 18 aa, Artificial
  Short Peptide
KWKKFLKIPKFKKAALKF

SEQ ID NO: 549 - protein, 18 aa, Artificial
  Short Peptide
RWKKFLKIPKFKKAALKF

SEQ ID NO: 550 - protein, 18 aa, Artificial
  Short Peptide
FWKKFLKIPKFKKAALKF

SEQ ID NO: 551 - protein, 18 aa, Artificial
  Short Peptide
KKKLLLKIPKFKKAALKF

SEQ ID NO: 552 - protein, 18 aa, Artificial
  Short Peptide
RKKLLLKIPKFKKAALKF

SEQ ID NO: 553 - protein, 18 aa, Artificial
  Short Peptide
FKKLLLKIPKFKKAALKF

SEQ ID NO: 554 - protein, 18 aa, Artificial
  Short Peptide
KWKLLLKIPKFKKAALKF

SEQ ID NO: 555 - protein, 18 aa, Artificial
  Short Peptide
RWKLLLKIPKFKKAALKF

SEQ ID NO: 556 - protein, 18 aa, Artificial
  Short Peptide
FWKLLLKIPKFKKAALKF

SEQ ID NO: 557 - protein, 18 aa, Artificial
  Short Peptide
KKKKLLKIPKFKKAALKF

SEQ ID NO: 558 - protein, 18 aa, Artificial
  Short Peptide
RKKKLLKIPKFKKAALKF

SEQ ID NO: 559 - protein, 18 aa, Artificial
  Short Peptide
FKKKLLKIPKFKKAALKF

SEQ ID NO: 560 - protein, 18 aa, Artificial
  Short Peptide
KWKKLLKIPKFKKAALKF

SEQ ID NO: 561 - protein, 18 aa, Artificial
  Short Peptide
RWKKLLKIPKFKKAALKF

SEQ ID NO: 562 - protein, 18 aa, Artificial
  Short Peptide
FWKKLLKIPKFKKAALKF

SEQ ID NO: 563 - protein, 18 aa, Artificial
  Short Peptide
KKKLFKKIPKFKKAALKF

SEQ ID NO: 564 - protein, 18 aa, Artificial
  Short Peptide
RKKLFKKIPKFKKAALKF

SEQ ID NO: 565 - protein, 18 aa, Artificial
  Short Peptide
FKKLFKKIPKFKKAALKF

SEQ ID NO: 566 - protein, 18 aa, Artificial
  Short Peptide
KWKLFKKIPKFKKAALKF

SEQ ID NO: 567 - protein, 18 aa, Artificial
  Short Peptide
RWKLFKKIPKFKKAALKF

SEQ ID NO: 568 - protein, 18 aa, Artificial
  Short Peptide
FWKLFKKIPKFKKAALKF

SEQ ID NO: 569 - protein, 18 aa, Artificial
  Short Peptide
KKKKFKKIPKFKKAALKF

SEQ ID NO: 570 - protein, 18 aa, Artificial
  Short Peptide
RKKKFKKIPKFKKAALKF

SEQ ID NO: 571 - protein, 18 aa, Artificial
  Short Peptide
FKKKFKKIPKFKKAALKF

SEQ ID NO: 572 - protein, 18 aa, Artificial
  Short Peptide
KWKKFKKIPKFKKAALKF

SEQ ID NO: 573 - protein, 18 aa, Artificial
  Short Peptide
RWKKFKKIPKFKKAALKF

SEQ ID NO: 574 - protein, 18 aa, Artificial
  Short Peptide
FWKKFKKIPKFKKAALKF

SEQ ID NO: 575 - protein, 18 aa, Artificial
  Short Peptide
KKKLLKKIPKFKKAALKF

SEQ ID NO: 576 - protein, 18 aa, Artificial
  Short Peptide
RKKLLKKIPKFKKAALKF

SEQ ID NO: 577 - protein, 18 aa, Artificial
  Short Peptide
FKKLLKKIPKFKKAALKF

SEQ ID NO: 578 - protein, 18 aa, Artificial
  Short Peptide
KWKLLKKIPKFKKAALKF

SEQ ID NO: 579 - protein, 18 aa, Artificial
  Short Peptide
RWKLLKKIPKFKKAALKF

SEQ ID NO: 580 - protein, 18 aa, Artificial
  Short Peptide
FWKLLKKIPKFKKAALKF

SEQ ID NO: 581 - protein, 18 aa, Artificial
  Short Peptide
KKKKLKKIPKFKKAALKF

SEQ ID NO: 582 - protein, 18 aa, Artificial
  Short Peptide
RKKKLKKIPKFKKAALKF

SEQ ID NO: 583 - protein, 18 aa, Artificial
  Short Peptide
FKKKLKKIPKFKKAALKF

SEQ ID NO: 584 - protein, 18 aa, Artificial
  Short Peptide
KWKKLKKIPKFKKAALKF

SEQ ID NO: 585 - protein, 18 aa, Artificial
  Short Peptide
RWKKLKKIPKFKKAALKF

SEQ ID NO: 586 - protein, 18 aa, Artificial
  Short Peptide
FWKKLKKIPKFKKAALKF

SEQ ID NO: 587 - protein, 20 aa, Artificial
  Short Peptide
KKKLFLKIPPPKFLHLALKF

SEQ ID NO: 588 - protein, 20 aa, Artificial
  Short Peptide
RKKLFLKIPPPKFLHLALKF

SEQ ID NO: 589 - protein, 20 aa, Artificial
  Short Peptide
FKKLFLKIPPPKFLHLALKF

SEQ ID NO: 590 - protein, 20 aa, Artificial
  Short Peptide
KWKLFLKIPPPKFLHLALKF

SEQ ID NO: 591 - protein, 20 aa, Artificial
  Short Peptide
RWKLFLKIPPPKFLHLALKF

SEQ ID NO: 592 - protein, 20 aa, Artificial
  Short Peptide
FWKLFLKIPPPKFLHLALKF

SEQ ID NO: 593 - protein, 20 aa, Artificial
  Short Peptide
KKKKFLKIPPPKFLHLALKF

SEQ ID NO: 594 - protein, 20 aa, Artificial
  Short Peptide
RKKKFLKIPPPKFLHLALKF

SEQ ID NO: 595 - protein, 20 aa, Artificial
  Short Peptide
FKKKFLKIPPPKFLHLALKF

SEQ ID NO: 596 - protein, 20 aa, Artificial
  Short Peptide
KWKKFLKIPPPKFLHLALKF

SEQ ID NO: 597 - protein, 20 aa, Artificial
  Short Peptide
RWKKFLKIPPPKFLHLALKF

SEQ ID NO: 598 - protein, 20 aa, Artificial
  Short Peptide
FWKKFLKIPPPKFLHLALKF

SEQ ID NO: 599 - protein, 20 aa, Artificial
  Short Peptide
KKKLLLKIPPPKFLHLALKF

SEQ ID NO: 600 - protein, 20 aa, Artificial
  Short Peptide
RKKLLLKIPPPKFLHLALKF

SEQ ID NO: 601 - protein, 20 aa, Artificial
  Short Peptide
FKKLLLKIPPPKFLHLALKF

SEQ ID NO: 602 - protein, 20 aa, Artificial
  Short Peptide
KWKLLLKIPPPKFLHLALKF

SEQ ID NO: 603 - protein, 20 aa, Artificial
  Short Peptide
RWKLLLKIPPPKFLHLALKF

SEQ ID NO: 604 - protein, 20 aa, Artificial
  Short Peptide
FWKLLLKIPPPKFLHLALKF

SEQ ID NO: 605 - protein, 20 aa, Artificial
  Short Peptide
KKKKLLKIPPPKFLHLALKF

SEQ ID NO: 606 - protein, 20 aa, Artificial
  Short Peptide
RKKKLLKIPPPKFLHLALKF

SEQ ID NO: 607 - protein, 20 aa, Artificial
  Short Peptide
FKKKLLKIPPPKFLHLALKF

SEQ ID NO: 608 - protein, 20 aa, Artificial
  Short Peptide
KWKKLLKIPPPKFLHLALKF

SEQ ID NO: 609 - protein, 20 aa, Artificial
  Short Peptide
RWKKLLKIPPPKFLHLALKF

SEQ ID NO: 610 - protein, 20 aa, Artificial
  Short Peptide
FWKKLLKIPPPKFLHLALKF

SEQ ID NO: 611 - protein, 20 aa, Artificial
  Short Peptide
KKKLFKKIPPPKFLHLALKF

SEQ ID NO: 612 - protein, 20 aa, Artificial
  Short Peptide
RKKLFKKIPPPKFLHLALKF

SEQ ID NO: 613 - protein, 20 aa, Artificial
  Short Peptide
FKKLFKKIPPPKFLHLALKF

SEQ ID NO: 614 - protein, 20 aa, Artificial
  Short Peptide
KWKLFKKIPPPKFLHLALKF

SEQ ID NO: 615 - protein, 20 aa, Artificial
  Short Peptide
RWKLFKKIPPPKFLHLALKF

SEQ ID NO: 616 - protein, 20 aa, Artificial
  Short Peptide
FWKLFKKIPPPKFLHLALKF

SEQ ID NO: 617 - protein, 20 aa, Artificial
  Short Peptide
KKKKFKKIPPPKFLHLALKF

SEQ ID NO: 618 - protein, 20 aa, Artificial
  Short Peptide
RKKKFKKIPPPKFLHLALKF

SEQ ID NO: 619 - protein, 20 aa, Artificial
  Short Peptide
FKKKFKKIPPPKFLHLALKF

SEQ ID NO: 620 - protein, 20 aa, Artificial
  Short Peptide
KWKKFKKIPPPKFLHLALKF

SEQ ID NO: 621 - protein, 20 aa, Artificial
  Short Peptide
RWKKFKKIPPPKFLHLALKF

SEQ ID NO: 622 - protein, 20 aa, Artificial
  Short Peptide
FWKKFKKIPPPKFLHLALKF

SEQ ID NO: 623 - protein, 20 aa, Artificial
  Short Peptide
KKKLLKKIPPPKFLHLALKF

SEQ ID NO: 624 - protein, 20 aa, Artificial
  Short Peptide
RKKLLKKIPPPKFLHLALKF

SEQ ID NO: 625 - protein, 20 aa, Artificial
  Short Peptide
FKKLLKKIPPPKFLHLALKF

SEQ ID NO: 626 - protein, 20 aa, Artificial
  Short Peptide
KWKLLKKIPPPKFLHLALKF

SEQ ID NO: 627 - protein, 20 aa, Artificial
  Short Peptide
RWKLLKKIPPPKFLHLALKF

SEQ ID NO: 628 - protein, 20 aa, Artificial
  Short Peptide
FWKLLKKIPPPKFLHLALKF

SEQ ID NO: 629 - protein, 20 aa, Artificial
  Short Peptide
KKKKLKKIPPPKFLHLALKF

SEQ ID NO: 630 - protein, 20 aa, Artificial
  Short Peptide
RKKKLKKIPPPKFLHLALKF

SEQ ID NO: 631 - protein, 20 aa, Artificial
  Short Peptide
FKKKLKKIPPPKFLHLALKF

SEQ ID NO: 632 - protein, 20 aa, Artificial
  Short Peptide
KWKKLKKIPPPKFLHLALKF

SEQ ID NO: 633 - protein, 20 aa, Artificial
  Short Peptide
RWKKLKKIPPPKFLHLALKF

SEQ ID NO: 634 - protein, 20 aa, Artificial
  Short Peptide
FWKKLKKIPPPKFLHLALKF

SEQ ID NO: 635 - protein, 19 aa, Artificial
  Short Peptide
KKKLFLKIPPKFLHLALKF

SEQ ID NO: 636 - protein, 19 aa, Artificial
  Short Peptide
RKKLFLKIPPKFLHLALKF

SEQ ID NO: 637 - protein, 19 aa, Artificial
  Short Peptide
FKKLFLKIPPKFLHLALKF

SEQ ID NO: 638 - protein, 19 aa, Artificial
  Short Peptide
KWKLFLKIPPKFLHLALKF

SEQ ID NO: 639 - protein, 19 aa, Artificial
  Short Peptide
RWKLFLKIPPKFLHLALKF

SEQ ID NO: 640 - protein, 19 aa, Artificial
  Short Peptide
FWKLFLKIPPKFLHLALKF

SEQ ID NO: 641 - protein, 19 aa, Artificial
  Short Peptide
KKKKFLKIPPKFLHLALKF

SEQ ID NO: 642 - protein, 19 aa, Artificial
  Short Peptide
RKKKFLKIPPKFLHLALKF

SEQ ID NO: 643 - protein, 19 aa, Artificial
  Short Peptide
FKKKFLKIPPKFLHLALKF

SEQ ID NO: 644 - protein, 19 aa, Artificial
  Short Peptide
KWKKFLKIPPKFLHLALKF

SEQ ID NO: 645 - protein, 19 aa, Artificial
  Short Peptide
RWKKFLKIPPKFLHLALKF

SEQ ID NO: 646 - protein, 19 aa, Artificial
  Short Peptide
FWKKFLKIPPKFLHLALKF

SEQ ID NO: 647 - protein, 19 aa, Artificial
  Short Peptide
KKKLLLKIPPKFLHLALKF

SEQ ID NO: 648 - protein, 19 aa, Artificial
  Short Peptide
RKKLLLKIPPKFLHLALKF

SEQ ID NO: 649 - protein, 19 aa, Artificial
  Short Peptide
FKKLLLKIPPKFLHLALKF

SEQ ID NO: 650 - protein, 19 aa, Artificial
  Short Peptide
KWKLLLKIPPKFLHLALKF

SEQ ID NO: 651 - protein, 19 aa, Artificial
  Short Peptide
RWKLLLKIPPKFLHLALKF

SEQ ID NO: 652 - protein, 19 aa, Artificial
  Short Peptide
FWKLLLKIPPKFLHLALKF

SEQ ID NO: 653 - protein, 19 aa, Artificial
  Short Peptide
KKKKLLKIPPKFLHLALKF

SEQ ID NO: 654 - protein, 19 aa, Artificial
  Short Peptide
RKKKLLKIPPKFLHLALKF

SEQ ID NO: 655 - protein, 19 aa, Artificial
  Short Peptide
FKKKLLKIPPKFLHLALKF

SEQ ID NO: 656 - protein, 19 aa, Artificial
  Short Peptide
KWKKLLKIPPKFLHLALKF

SEQ ID NO: 657 - protein, 19 aa, Artificial
  Short Peptide
RWKKLLKIPPKFLHLALKF

SEQ ID NO: 658 - protein, 19 aa, Artificial
  Short Peptide
FWKKLLKIPPKFLHLALKF

SEQ ID NO: 659 - protein, 19 aa, Artificial
  Short Peptide
KKKLFKKIPPKFLHLALKF

SEQ ID NO: 660 - protein, 19 aa, Artificial
  Short Peptide
RKKLFKKIPPKFLHLALKF

SEQ ID NO: 661 - protein, 19 aa, Artificial
  Short Peptide
FKKLFKKIPPKFLHLALKF

SEQ ID NO: 662 - protein, 19 aa, Artificial
  Short Peptide
KWKLFKKIPPKFLHLALKF

SEQ ID NO: 663 - protein, 19 aa, Artificial
  Short Peptide
RWKLFKKIPPKFLHLALKF

SEQ ID NO: 664 - protein, 19 aa, Artificial
  Short Peptide
FWKLFKKIPPKFLHLALKF

SEQ ID NO: 665 - protein, 19 aa, Artificial
  Short Peptide
KKKKFKKIPPKFLHLALKF

SEQ ID NO: 666 - protein, 19 aa, Artificial
  Short Peptide
RKKKFKKIPPKFLHLALKF

SEQ ID NO: 667 - protein, 19 aa, Artificial
  Short Peptide
FKKKFKKIPPKFLHLALKF

SEQ ID NO: 668 - protein, 19 aa, Artificial
  Short Peptide
KWKKFKKIPPKFLHLALKF

SEQ ID NO: 669 - protein, 19 aa, Artificial
  Short Peptide
RWKKFKKIPPKFLHLALKF

SEQ ID NO: 670 - protein, 19 aa, Artificial
  Short Peptide
FWKKFKKIPPKFLHLALKF

SEQ ID NO: 671 - protein, 19 aa, Artificial
  Short Peptide
KKKLLKKIPPKFLHLALKF

SEQ ID NO: 672 - protein, 19 aa, Artificial
  Short Peptide
RKKLLKKIPPKFLHLALKF

SEQ ID NO: 673 - protein, 19 aa, Artificial
  Short Peptide
FKKLLKKIPPKFLHLALKF

SEQ ID NO: 674 - protein, 19 aa, Artificial
  Short Peptide
KWKLLKKIPPKFLHLALKF

SEQ ID NO: 675 - protein, 19 aa, Artificial
  Short Peptide
RWKLLKKIPPKFLHLALKF

SEQ ID NO: 676 - protein, 19 aa, Artificial
  Short Peptide
FWKLLKKIPPKFLHLALKF

SEQ ID NO: 677 - protein, 19 aa, Artificial
  Short Peptide
KKKKLKKIPPKFLHLALKF

SEQ ID NO: 678 - protein, 19 aa, Artificial
  Short Peptide
RKKKLKKIPPKFLHLALKF

SEQ ID NO: 679 - protein, 19 aa, Artificial
  Short Peptide
FKKKLKKIPPKFLHLALKF

SEQ ID NO: 680 - protein, 19 aa, Artificial
  Short Peptide
KWKKLKKIPPKFLHLALKF

SEQ ID NO: 681 - protein, 19 aa, Artificial
  Short Peptide
RWKKLKKIPPKFLHLALKF

SEQ ID NO: 682 - protein, 19 aa, Artificial
  Short Peptide
FWKKLKKIPPKFLHLALKF

SEQ ID NO: 683 - protein, 18 aa, Artificial
  Short Peptide
KKKLFLKIPKFLHLALKF

SEQ ID NO: 684 - protein, 18 aa, Artificial
  Short Peptide
RKKLFLKIPKFLHLALKF

SEQ ID NO: 685 - protein, 18 aa, Artificial
  Short Peptide
FKKLFLKIPKFLHLALKF

SEQ ID NO: 686 - protein, 18 aa, Artificial
  Short Peptide
KWKLFLKIPKFLHLALKF

SEQ ID NO: 687 - protein, 18 aa, Artificial
  Short Peptide
RWKLFLKIPKFLHLALKF

SEQ ID NO: 688 - protein, 18 aa, Artificial
  Short Peptide
FWKLFLKIPKFLHLALKF

SEQ ID NO: 689 - protein, 18 aa, Artificial
  Short Peptide
KKKKFLKIPKFLHLALKF

SEQ ID NO: 690 - protein, 18 aa, Artificial
  Short Peptide
RKKKFLKIPKFLHLALKF

SEQ ID NO: 691 - protein, 18 aa, Artificial
  Short Peptide
FKKKFLKIPKFLHLALKF

SEQ ID NO: 692 - protein, 18 aa, Artificial
  Short Peptide
KWKKFLKIPKFLHLALKF

SEQ ID NO: 693 - protein, 18 aa, Artificial
  Short Peptide
RWKKFLKIPKFLHLALKF

SEQ ID NO: 694 - protein, 18 aa, Artificial
  Short Peptide
FWKKFLKIPKFLHLALKF

SEQ ID NO: 695 - protein, 18 aa, Artificial
  Short Peptide
KKKLLLKIPKFLHLALKF

SEQ ID NO: 696 - protein, 18 aa, Artificial
  Short Peptide
RKKLLLKIPKFLHLALKF

SEQ ID NO: 697 - protein, 18 aa, Artificial
  Short Peptide
FKKLLLKIPKFLHLALKF

SEQ ID NO: 698 - protein, 18 aa, Artificial
  Short Peptide
KWKLLLKIPKFLHLALKF

SEQ ID NO: 699 - protein, 18 aa, Artificial
  Short Peptide
RWKLLLKIPKFLHLALKF

SEQ ID NO: 700 - protein, 18 aa, Artificial
  Short Peptide
FWKLLLKIPKFLHLALKF

SEQ ID NO: 701 - protein, 18 aa, Artificial
  Short Peptide
KKKKLLKIPKFLHLALKF

SEQ ID NO: 702 - protein, 18 aa, Artificial
  Short Peptide
RKKKLLKIPKFLHLALKF

SEQ ID NO: 703 - protein, 18 aa, Artificial
  Short Peptide
FKKKLLKIPKFLHLALKF

SEQ ID NO: 704 - protein, 18 aa, Artificial
  Short Peptide
KWKKLLKIPKFLHLALKF

SEQ ID NO: 705 - protein, 18 aa, Artificial
  Short Peptide
RWKKLLKIPKFLHLALKF

SEQ ID NO: 706 - protein, 18 aa, Artificial
  Short Peptide
FWKKLLKIPKFLHLALKF

SEQ ID NO: 707 - protein, 18 aa, Artificial
  Short Peptide
KKKLFKKIPKFLHLALKF

SEQ ID NO: 708 - protein, 18 aa, Artificial
  Short Peptide
RKKLFKKIPKFLHLALKF

SEQ ID NO: 709 - protein, 18 aa, Artificial
  Short Peptide
FKKLFKKIPKFLHLALKF

SEQ ID NO: 710 - protein, 18 aa, Artificial
  Short Peptide
KWKLFKKIPKFLHLALKF

SEQ ID NO: 711 - protein, 18 aa, Artificial
  Short Peptide
RWKLFKKIPKFLHLALKF

SEQ ID NO: 712 - protein, 18 aa, Artificial
  Short Peptide
FWKLFKKIPKFLHLALKF

SEQ ID NO: 713 - protein, 18 aa, Artificial
  Short Peptide
KKKKFKKIPKFLHLALKF

SEQ ID NO: 714 - protein, 18 aa, Artificial
  Short Peptide
RKKKFKKIPKFLHLALKF

SEQ ID NO: 715 - protein, 18 aa, Artificial
  Short Peptide
FKKKFKKIPKFLHLALKF

SEQ ID NO: 716 - protein, 18 aa, Artificial
  Short Peptide
KWKKFKKIPKFLHLALKF

SEQ ID NO: 717 - protein, 18 aa, Artificial
  Short Peptide
RWKKFKKIPKFLHLALKF

SEQ ID NO: 718 - protein, 18 aa, Artificial
  Short Peptide
FWKKFKKIPKFLHLALKF

SEQ ID NO: 719 - protein, 18 aa, Artificial
  Short Peptide
KKKLLKKIPKFLHLALKF

SEQ ID NO: 720 - protein, 18 aa, Artificial
  Short Peptide
RKKLLKKIPKFLHLALKF

SEQ ID NO: 721 - protein, 18 aa, Artificial
  Short Peptide
FKKLLKKIPKFLHLALKF

SEQ ID NO: 722 - protein, 18 aa, Artificial
  Short Peptide
KWKLLKKIPKFLHLALKF

SEQ ID NO: 723 - protein, 18 aa, Artificial
  Short Peptide
RWKLLKKIPKFLHLALKF

SEQ ID NO: 724 - protein, 18 aa, Artificial
  Short Peptide
FWKLLKKIPKFLHLALKF

SEQ ID NO: 725 - protein, 18 aa, Artificial
  Short Peptide
KKKKLKKIPKFLHLALKF

SEQ ID NO: 726 - protein, 18 aa, Artificial
  Short Peptide
RKKKLKKIPKFLHLALKF

SEQ ID NO: 727 - protein, 18 aa, Artificial
  Short Peptide
FKKKLKKIPKFLHLALKF

SEQ ID NO: 728 - protein, 18 aa, Artificial
  Short Peptide
KWKKLKKIPKFLHLALKF

SEQ ID NO: 729 - protein, 18 aa, Artificial
  Short Peptide
RWKKLKKIPKFLHLALKF

SEQ ID NO: 730 - protein, 18 aa, Artificial
  Short Peptide
FWKKLKKIPKFLHLALKF

SEQ ID NO: 731 - protein, 20 aa, Artificial
  Short Peptide
KKKLFLKIPPPKFKHLALKF

SEQ ID NO: 732 - protein, 20 aa, Artificial
  Short Peptide
RKKLFLKIPPPKFKHLALKF

SEQ ID NO: 733 - protein, 20 aa, Artificial
  Short Peptide
FKKLFLKIPPPKFKHLALKF

SEQ ID NO: 734 - protein, 20 aa, Artificial
  Short Peptide
KWKLFLKIPPPKFKHLALKF

SEQ ID NO: 735 - protein, 20 aa, Artificial
  Short Peptide
RWKLFLKIPPPKFKHLALKF

SEQ ID NO: 736 - protein, 20 aa, Artificial
  Short Peptide
FWKLFLKIPPPKFKHLALKF

SEQ ID NO: 737 - protein, 20 aa, Artificial
  Short Peptide
KKKKFLKIPPPKFKHLALKF

SEQ ID NO: 738 - protein, 20 aa, Artificial
  Short Peptide
RKKKFLKIPPPKFKHLALKF

SEQ ID NO: 739 - protein, 20 aa, Artificial
  Short Peptide
FKKKFLKIPPPKFKHLALKF

SEQ ID NO: 740 - protein, 20 aa, Artificial
  Short Peptide
KWKKFLKIPPPKFKHLALKF

SEQ ID NO: 741 - protein, 20 aa, Artificial
  Short Peptide
RWKKFLKIPPPKFKHLALKF

SEQ ID NO: 742 - protein, 20 aa, Artificial
  Short Peptide
FWKKFLKIPPPKFKHLALKF

SEQ ID NO: 743 - protein, 20 aa, Artificial
  Short Peptide
KKKLLLKIPPPKFKHLALKF

SEQ ID NO: 744 - protein, 20 aa, Artificial
  Short Peptide
RKKLLLKIPPPKFKHLALKF

SEQ ID NO: 745 - protein, 20 aa, Artificial
  Short Peptide
FKKLLLKIPPPKFKHLALKF

SEQ ID NO: 746 - protein, 20 aa, Artificial
  Short Peptide
KWKLLLKIPPPKFKHLALKF

SEQ ID NO: 747 - protein, 20 aa, Artificial
  Short Peptide
RWKLLLKIPPPKFKHLALKF

SEQ ID NO: 748 - protein, 20 aa, Artificial
  Short Peptide
FWKLLLKIPPPKFKHLALKF

SEQ ID NO: 749 - protein, 20 aa, Artificial
  Short Peptide
KKKKLLKIPPPKFKHLALKF

SEQ ID NO: 750 - protein, 20 aa, Artificial
  Short Peptide
RKKKLLKIPPPKFKHLALKF

SEQ ID NO: 751 - protein, 20 aa, Artificial
  Short Peptide
FKKKLLKIPPPKFKHLALKF

SEQ ID NO: 752 - protein, 20 aa, Artificial
  Short Peptide
KWKKLLKIPPPKFKHLALKF

SEQ ID NO: 753 - protein, 20 aa, Artificial
  Short Peptide
RWKKLLKIPPPKFKHLALKF

SEQ ID NO: 754 - protein, 20 aa, Artificial
  Short Peptide
FWKKLLKIPPPKFKHLALKF

SEQ ID NO: 755 - protein, 20 aa, Artificial
  Short Peptide
KKKLFKKIPPPKFKHLALKF

SEQ ID NO: 756 - protein, 20 aa, Artificial
  Short Peptide
RKKLFKKIPPPKFKHLALKF

SEQ ID NO: 757 - protein, 20 aa, Artificial
  Short Peptide
FKKLFKKIPPPKFKHLALKF

SEQ ID NO: 758 - protein, 20 aa, Artificial
  Short Peptide
KWKLFKKIPPPKFKHLALKF

SEQ ID NO: 759 - protein, 20 aa, Artificial
  Short Peptide
RWKLFKKIPPPKFKHLALKF

SEQ ID NO: 760 - protein, 20 aa, Artificial
  Short Peptide
FWKLFKKIPPPKFKHLALKF

SEQ ID NO: 761 - protein, 20 aa, Artificial
  Short Peptide
KKKKFKKIPPPKFKHLALKF

SEQ ID NO: 762 - protein, 20 aa, Artificial
  Short Peptide
RKKKFKKIPPPKFKHLALKF

SEQ ID NO: 763 - protein, 20 aa, Artificial
  Short Peptide
FKKKFKKIPPPKFKHLALKF

SEQ ID NO: 764 - protein, 20 aa, Artificial
  Short Peptide
KWKKFKKIPPPKFKHLALKF

SEQ ID NO: 765 - protein, 20 aa, Artificial
  Short Peptide
RWKKFKKIPPPKFKHLALKF

SEQ ID NO: 766 - protein, 20 aa, Artificial
  Short Peptide
FWKKFKKIPPPKFKHLALKF

SEQ ID NO: 767 - protein, 20 aa, Artificial
  Short Peptide
KKKLLKKIPPPKFKHLALKF

SEQ ID NO: 768 - protein, 20 aa, Artificial
  Short Peptide
RKKLLKKIPPPKFKHLALKF

SEQ ID NO: 769 - protein, 20 aa, Artificial
  Short Peptide
FKKLLKKIPPPKFKHLALKF

SEQ ID NO: 770 - protein, 20 aa, Artificial
  Short Peptide
KWKLLKKIPPPKFKHLALKF

SEQ ID NO: 771 - protein, 20 aa, Artificial
  Short Peptide
RWKLLKKIPPPKFKHLALKF

SEQ ID NO: 772 - protein, 20 aa, Artificial
  Short Peptide
FWKLLKKIPPPKFKHLALKF

SEQ ID NO: 773 - protein, 20 aa, Artificial
  Short Peptide
KKKKLKKIPPPKFKHLALKF

SEQ ID NO: 774 - protein, 20 aa, Artificial
  Short Peptide
RKKKLKKIPPPKFKHLALKF

SEQ ID NO: 775 - protein, 20 aa, Artificial
  Short Peptide
FKKKLKKIPPPKFKHLALKF

SEQ ID NO: 776 - protein, 20 aa, Artificial
  Short Peptide
KWKKLKKIPPPKFKHLALKF

SEQ ID NO: 777 - protein, 20 aa, Artificial
  Short Peptide
RWKKLKKIPPPKFKHLALKF

SEQ ID NO: 778 - protein, 20 aa, Artificial
  Short Peptide
FWKKLKKIPPPKFKHLALKF

SEQ ID NO: 779 - protein, 19 aa, Artificial
  Short Peptide
KKKLFLKIPPKFKHLALKF

SEQ ID NO: 780 - protein, 19 aa, Artificial
  Short Peptide
RKKLFLKIPPKFKHLALKF

SEQ ID NO: 781 - protein, 19 aa, Artificial
  Short Peptide
FKKLFLKIPPKFKHLALKF

SEQ ID NO: 782 - protein, 19 aa, Artificial
  Short Peptide
KWKLFLKIPPKFKHLALKF

SEQ ID NO: 783 - protein, 19 aa, Artificial
  Short Peptide
RWKLFLKIPPKFKHLALKF

SEQ ID NO: 784 - protein, 19 aa, Artificial
  Short Peptide
FWKLFLKIPPKFKHLALKF

SEQ ID NO: 785 - protein, 19 aa, Artificial
  Short Peptide
KKKKFLKIPPKFKHLALKF

SEQ ID NO: 786 - protein, 19 aa, Artificial
  Short Peptide
RKKKFLKIPPKFKHLALKF

SEQ ID NO: 787 - protein, 19 aa, Artificial
  Short Peptide
FKKKFLKIPPKFKHLALKF

SEQ ID NO: 788 - protein, 19 aa, Artificial
  Short Peptide
KWKKFLKIPPKFKHLALKF

SEQ ID NO: 789 - protein, 19 aa, Artificial
  Short Peptide
RWKKFLKIPPKFKHLALKF

SEQ ID NO: 790 - protein, 19 aa, Artificial
  Short Peptide
FWKKFLKIPPKFKHLALKF

SEQ ID NO: 791 - protein, 19 aa, Artificial
  Short Peptide
KKKLLLKIPPKFKHLALKF

SEQ ID NO: 792 - protein, 19 aa, Artificial
  Short Peptide
RKKLLLKIPPKFKHLALKF

SEQ ID NO: 793 - protein, 19 aa, Artificial
  Short Peptide
FKKLLLKIPPKFKHLALKF

SEQ ID NO: 794 - protein, 19 aa, Artificial
  Short Peptide
KWKLLLKIPPKFKHLALKF

SEQ ID NO: 795 - protein, 19 aa, Artificial
  Short Peptide
RWKLLLKIPPKFKHLALKF

SEQ ID NO: 796 - protein, 19 aa, Artificial
  Short Peptide
FWKLLLKIPPKFKHLALKF

SEQ ID NO: 797 - protein, 19 aa, Artificial
  Short Peptide
KKKKLLKIPPKFKHLALKF

SEQ ID NO: 798 - protein, 19 aa, Artificial
  Short Peptide
RKKKLLKIPPKFKHLALKF

SEQ ID NO: 799 - protein, 19 aa, Artificial
  Short Peptide
FKKKLLKIPPKFKHLALKF

SEQ ID NO: 800 - protein, 19 aa, Artificial
  Short Peptide
KWKKLLKIPPKFKHLALKF

SEQ ID NO: 801 - protein, 19 aa, Artificial
  Short Peptide
RWKKLLKIPPKFKHLALKF

SEQ ID NO: 802 - protein, 19 aa, Artificial
  Short Peptide
FWKKLLKIPPKFKHLALKF

SEQ ID NO: 803 - protein, 19 aa, Artificial
  Short Peptide
KKKLFKKIPPKFKHLALKF

SEQ ID NO: 804 - protein, 19 aa, Artificial
  Short Peptide
RKKLFKKIPPKFKHLALKF

SEQ ID NO: 805 - protein, 19 aa, Artificial
  Short Peptide
FKKLFKKIPPKFKHLALKF

SEQ ID NO: 806 - protein, 19 aa, Artificial
  Short Peptide
KWKLFKKIPPKFKHLALKF

SEQ ID NO: 807 - protein, 19 aa, Artificial
  Short Peptide
RWKLFKKIPPKFKHLALKF

SEQ ID NO: 808 - protein, 19 aa, Artificial
  Short Peptide
FWKLFKKIPPKFKHLALKF

SEQ ID NO: 809 - protein, 19 aa, Artificial
  Short Peptide
KKKKFKKIPPKFKHLALKF

SEQ ID NO: 810 - protein, 19 aa, Artificial
  Short Peptide
RKKKFKKIPPKFKHLALKF

SEQ ID NO: 811 - protein, 19 aa, Artificial
  Short Peptide
FKKKFKKIPPKFKHLALKF

SEQ ID NO: 812 - protein, 19 aa, Artificial
  Short Peptide
KWKKFKKIPPKFKHLALKF

SEQ ID NO: 813 - protein, 19 aa, Artificial
  Short Peptide
RWKKFKKIPPKFKHLALKF

SEQ ID NO: 814 - protein, 19 aa, Artificial
  Short Peptide
FWKKFKKIPPKFKHLALKF

SEQ ID NO: 815 - protein, 19 aa, Artificial
  Short Peptide
KKKLLKKIPPKFKHLALKF

SEQ ID NO: 816 - protein, 19 aa, Artificial
  Short Peptide
RKKLLKKIPPKFKHLALKF

SEQ ID NO: 817 - protein, 19 aa, Artificial
  Short Peptide
FKKLLKKIPPKFKHLALKF

SEQ ID NO: 818 - protein, 19 aa, Artificial
  Short Peptide
KWKLLKKIPPKFKHLALKF

SEQ ID NO: 819 - protein, 19 aa, Artificial
  Short Peptide
RWKLLKKIPPKFKHLALKF

SEQ ID NO: 820 - protein, 19 aa, Artificial
  Short Peptide
FWKLLKKIPPKFKHLALKF

SEQ ID NO: 821 - protein, 19 aa, Artificial
  Short Peptide
KKKKLKKIPPKFKHLALKF

SEQ ID NO: 822 - protein, 19 aa, Artificial
  Short Peptide
RKKKLKKIPPKFKHLALKF

SEQ ID NO: 823 - protein, 19 aa, Artificial
  Short Peptide
FKKKLKKIPPKFKHLALKF

SEQ ID NO: 824 - protein, 19 aa, Artificial
  Short Peptide
KWKKLKKIPPKFKHLALKF

SEQ ID NO: 825 - protein, 19 aa, Artificial
  Short Peptide
RWKKLKKIPPKFKHLALKF

SEQ ID NO: 826 - protein, 19 aa, Artificial
  Short Peptide
FWKKLKKIPPKFKHLALKF

SEQ ID NO: 827 - protein, 18 aa, Artificial
  Short Peptide
KKKLFLKIPKFKHLALKF

SEQ ID NO: 828 - protein, 18 aa, Artificial
  Short Peptide
RKKLFLKIPKFKHLALKF

SEQ ID NO: 829 - protein, 18 aa, Artificial
  Short Peptide
FKKLFLKIPKFKHLALKF

SEQ ID NO: 830 - protein, 18 aa, Artificial
  Short Peptide
KWKLFLKIPKFKHLALKF

SEQ ID NO: 831 - protein, 18 aa, Artificial
  Short Peptide
RWKLFLKIPKFKHLALKF

SEQ ID NO: 832 - protein, 18 aa, Artificial
  Short Peptide
FWKLFLKIPKFKHLALKF

SEQ ID NO: 833 - protein, 18 aa, Artificial
  Short Peptide
KKKKFLKIPKFKHLALKF

SEQ ID NO: 834 - protein, 18 aa, Artificial
  Short Peptide
RKKKFLKIPKFKHLALKF

SEQ ID NO: 835 - protein, 18 aa, Artificial
  Short Peptide
FKKKFLKIPKFKHLALKF

SEQ ID NO: 836 - protein, 18 aa, Artificial
  Short Peptide
KWKKFLKIPKFKHLALKF

SEQ ID NO: 837 - protein, 18 aa, Artificial
  Short Peptide
RWKKFLKIPKFKHLALKF

SEQ ID NO: 838 - protein, 18 aa, Artificial
  Short Peptide
FWKKFLKIPKFKHLALKF

SEQ ID NO: 839 - protein, 18 aa, Artificial
  Short Peptide
KKKLLLKIPKFKHLALKF

SEQ ID NO: 840 - protein, 18 aa, Artificial
  Short Peptide
RKKLLLKIPKFKHLALKF

SEQ ID NO: 841 - protein, 18 aa, Artificial
  Short Peptide
FKKLLLKIPKFKHLALKF

SEQ ID NO: 842 - protein, 18 aa, Artificial
  Short Peptide
KWKLLLKIPKFKHLALKF

SEQ ID NO: 843 - protein, 18 aa, Artificial
  Short Peptide
RWKLLLKIPKFKHLALKF

SEQ ID NO: 844 - protein, 18 aa, Artificial
  Short Peptide
FWKLLLKIPKFKHLALKF

SEQ ID NO: 845 - protein, 18 aa, Artificial
  Short Peptide
KKKKLLKIPKFKHLALKF

SEQ ID NO: 846 - protein, 18 aa, Artificial
  Short Peptide
RKKKLLKIPKFKHLALKF

SEQ ID NO: 847 - protein, 18 aa, Artificial
  Short Peptide
FKKKLLKIPKFKHLALKF

SEQ ID NO: 848 - protein, 18 aa, Artificial
  Short Peptide
KWKKLLKIPKFKHLALKF

SEQ ID NO: 849 - protein, 18 aa, Artificial
  Short Peptide
RWKKLLKIPKFKHLALKF

SEQ ID NO: 850 - protein, 18 aa, Artificial
  Short Peptide
FWKKLLKIPKFKHLALKF

SEQ ID NO: 851 - protein, 18 aa, Artificial
  Short Peptide
KKKLFKKIPKFKHLALKF

SEQ ID NO: 852 - protein, 18 aa, Artificial
  Short Peptide
RKKLFKKIPKFKHLALKF

SEQ ID NO: 853 - protein, 18 aa, Artificial
  Short Peptide
FKKLFKKIPKFKHLALKF

SEQ ID NO: 854 - protein, 18 aa, Artificial
  Short Peptide
KWKLFKKIPKFKHLALKF

SEQ ID NO: 855 - protein, 18 aa, Artificial
  Short Peptide
RWKLFKKIPKFKHLALKF

SEQ ID NO: 856 - protein, 18 aa, Artificial
  Short Peptide
FWKLFKKIPKFKHLALKF

SEQ ID NO: 857 - protein, 18 aa, Artificial
  Short Peptide
KKKKFKKIPKFKHLALKF

SEQ ID NO: 858 - protein, 18 aa, Artificial
  Short Peptide
RKKKFKKIPKFKHLALKF

SEQ ID NO: 859 - protein, 18 aa, Artificial
  Short Peptide
FKKKFKKIPKFKHLALKF

SEQ ID NO: 860 - protein, 18 aa, Artificial
  Short Peptide
KWKKFKKIPKFKHLALKF

SEQ ID NO: 861 - protein, 18 aa, Artificial
  Short Peptide
RWKKFKKIPKFKHLALKF

SEQ ID NO: 862 - protein, 18 aa, Artificial
  Short Peptide
FWKKFKKIPKFKHLALKF

SEQ ID NO: 863 - protein, 18 aa, Artificial
  Short Peptide
KKKLLKKIPKFKHLALKF

SEQ ID NO: 864 - protein, 18 aa, Artificial
  Short Peptide
RKKLLKKIPKFKHLALKF

SEQ ID NO: 865 - protein, 18 aa, Artificial
  Short Peptide
FKKLLKKIPKFKHLALKF

SEQ ID NO: 866 - protein, 18 aa, Artificial
  Short Peptide
KWKLLKKIPKFKHLALKF

SEQ ID NO: 867 - protein, 18 aa, Artificial
  Short Peptide
RWKLLKKIPKFKHLALKF

SEQ ID NO: 868 - protein, 18 aa, Artificial
  Short Peptide
FWKLLKKIPKFKHLALKF

SEQ ID NO: 869 - protein, 18 aa, Artificial
  Short Peptide
KKKKLKKIPKFKHLALKF

SEQ ID NO: 870 - protein, 18 aa, Artificial
  Short Peptide
RKKKLKKIPKFKHLALKF

SEQ ID NO: 871 - protein, 18 aa, Artificial
  Short Peptide
FKKKLKKIPKFKHLALKF

SEQ ID NO: 872 - protein, 18 aa, Artificial
  Short Peptide
KWKKLKKIPKFKHLALKF

SEQ ID NO: 873 - protein, 18 aa, Artificial
  Short Peptide
RWKKLKKIPKFKHLALKF

SEQ ID NO: 874 - protein, 18 aa, Artificial
  Short Peptide
FWKKLKKIPKFKHLALKF

SEQ ID NO: 875 - protein, 20 aa, Artificial
  Short Peptide
KKKLFLKIPPPKFLKLALKF

SEQ ID NO: 876 - protein, 20 aa, Artificial
  Short Peptide
RKKLFLKIPPPKFLKLALKF

SEQ ID NO: 877 - protein, 20 aa, Artificial
  Short Peptide
FKKLFLKIPPPKFLKLALKF

SEQ ID NO: 878 - protein, 20 aa, Artificial
  Short Peptide
KWKLFLKIPPPKFLKLALKF

SEQ ID NO: 879 - protein, 20 aa, Artificial
  Short Peptide
RWKLFLKIPPPKFLKLALKF

SEQ ID NO: 880 - protein, 20 aa, Artificial
  Short Peptide
FWKLFLKIPPPKFLKLALKF

SEQ ID NO: 881 - protein, 20 aa, Artificial
  Short Peptide
KKKKFLKIPPPKFLKLALKF

SEQ ID NO: 882 - protein, 20 aa, Artificial
  Short Peptide
RKKKFLKIPPPKFLKLALKF

SEQ ID NO: 883 - protein, 20 aa, Artificial
  Short Peptide
FKKKFLKIPPPKFLKLALKF

SEQ ID NO: 884 - protein, 20 aa, Artificial
  Short Peptide
KWKKFLKIPPPKFLKLALKF

SEQ ID NO: 885 - protein, 20 aa, Artificial
  Short Peptide
RWKKFLKIPPPKFLKLALKF

SEQ ID NO: 886 - protein, 20 aa, Artificial
  Short Peptide
FWKKFLKIPPPKFLKLALKF

SEQ ID NO: 887 - protein, 20 aa, Artificial
  Short Peptide
KKKLLLKIPPPKFLKLALKF

SEQ ID NO: 888 - protein, 20 aa, Artificial
  Short Peptide
RKKLLLKIPPPKFLKLALKF

SEQ ID NO: 889 - protein, 20 aa, Artificial
  Short Peptide
FKKLLLKIPPPKFLKLALKF

SEQ ID NO: 890 - protein, 20 aa, Artificial
  Short Peptide
KWKLLLKIPPPKFLKLALKF

SEQ ID NO: 891 - protein, 20 aa, Artificial
  Short Peptide
RWKLLLKIPPPKFLKLALKF

SEQ ID NO: 892 - protein, 20 aa, Artificial
  Short Peptide
FWKLLLKIPPPKFLKLALKF

SEQ ID NO: 893 - protein, 20 aa, Artificial
  Short Peptide
KKKKLLKIPPPKFLKLALKF

SEQ ID NO: 894 - protein, 20 aa, Artificial
  Short Peptide
RKKKLLKIPPPKFLKLALKF

SEQ ID NO: 895 - protein, 20 aa, Artificial
  Short Peptide
FKKKLLKIPPPKFLKLALKF

SEQ ID NO: 896 - protein, 20 aa, Artificial
  Short Peptide
KWKKLLKIPPPKFLKLALKF

SEQ ID NO: 897 - protein, 20 aa, Artificial
  Short Peptide
RWKKLLKIPPPKFLKLALKF

SEQ ID NO: 898 - protein, 20 aa, Artificial
  Short Peptide
FWKKLLKIPPPKFLKLALKF

SEQ ID NO: 899 - protein, 20 aa, Artificial
  Short Peptide
KKKLFKKIPPPKFLKLALKF

SEQ ID NO: 900 - protein, 20 aa, Artificial
  Short Peptide
RKKLFKKIPPPKFLKLALKF

SEQ ID NO: 901 - protein, 20 aa, Artificial
  Short Peptide
FKKLFKKIPPPKFLKLALKF

SEQ ID NO: 902 - protein, 20 aa, Artificial
  Short Peptide
KWKLFKKIPPPKFLKLALKF

SEQ ID NO: 903 - protein, 20 aa, Artificial
  Short Peptide
RWKLFKKIPPPKFLKLALKF

SEQ ID NO: 904 - protein, 20 aa, Artificial
  Short Peptide
FWKLFKKIPPPKFLKLALKF

SEQ ID NO: 905 - protein, 20 aa, Artificial
  Short Peptide
KKKKFKKIPPPKFLKLALKF

SEQ ID NO: 906 - protein, 20 aa, Artificial
  Short Peptide
RKKKFKKIPPPKFLKLALKF

SEQ ID NO: 907 - protein, 20 aa, Artificial
  Short Peptide
FKKKFKKIPPPKFLKLALKF

SEQ ID NO: 908 - protein, 20 aa, Artificial
  Short Peptide
KWKKFKKIPPPKFLKLALKF

SEQ ID NO: 909 - protein, 20 aa, Artificial
  Short Peptide
RWKKFKKIPPPKFLKLALKF

SEQ ID NO: 910 - protein, 20 aa, Artificial
  Short Peptide
FWKKFKKIPPPKFLKLALKF

SEQ ID NO: 911 - protein, 20 aa, Artificial
  Short Peptide
KKKLLKKIPPPKFLKLALKF

SEQ ID NO: 912 - protein, 20 aa, Artificial
  Short Peptide
RKKLLKKIPPPKFLKLALKF

SEQ ID NO: 913 - protein, 20 aa, Artificial
  Short Peptide
FKKLLKKIPPPKFLKLALKF

SEQ ID NO: 914 - protein, 20 aa, Artificial
  Short Peptide
KWKLLKKIPPPKFLKLALKF

SEQ ID NO: 915 - protein, 20 aa, Artificial
  Short Peptide
RWKLLKKIPPPKFLKLALKF

SEQ ID NO: 916 - protein, 20 aa, Artificial
  Short Peptide
FWKLLKKIPPPKFLKLALKF

SEQ ID NO: 917 - protein, 20 aa, Artificial
  Short Peptide
KKKKLKKIPPPKFLKLALKF

SEQ ID NO: 918 - protein, 20 aa, Artificial
  Short Peptide
RKKKLKKIPPPKFLKLALKF

SEQ ID NO: 919 - protein, 20 aa, Artificial
  Short Peptide
FKKKLKKIPPPKFLKLALKF

SEQ ID NO: 920 - protein, 20 aa, Artificial
  Short Peptide
KWKKLKKIPPPKFLKLALKF

SEQ ID NO: 921 - protein, 20 aa, Artificial
  Short Peptide
RWKKLKKIPPPKFLKLALKF

SEQ ID NO: 922 - protein, 20 aa, Artificial
  Short Peptide
FWKKLKKIPPPKFLKLALKF

SEQ ID NO: 923 - protein, 19 aa, Artificial
  Short Peptide
KKKLFLKIPPKFLKLALKF

SEQ ID NO: 924 - protein, 19 aa, Artificial
  Short Peptide
RKKLFLKIPPKFLKLALKF

SEQ ID NO: 925 - protein, 19 aa, Artificial
  Short Peptide
FKKLFLKIPPKFLKLALKF

SEQ ID NO: 926 - protein, 19 aa, Artificial
  Short Peptide
KWKLFLKIPPKFLKLALKF

SEQ ID NO: 927 - protein, 19 aa, Artificial
  Short Peptide
RWKLFLKIPPKFLKLALKF

SEQ ID NO: 928 - protein, 19 aa, Artificial
  Short Peptide
FWKLFLKIPPKFLKLALKF

SEQ ID NO: 929 - protein, 19 aa, Artificial
  Short Peptide
KKKKFLKIPPKFLKLALKF

SEQ ID NO: 930 - protein, 19 aa, Artificial
  Short Peptide
RKKKFLKIPPKFLKLALKF

SEQ ID NO: 931 - protein, 19 aa, Artificial
  Short Peptide
FKKKFLKIPPKFLKLALKF

SEQ ID NO: 932 - protein, 19 aa, Artificial
  Short Peptide
KWKKFLKIPPKFLKLALKF

SEQ ID NO: 933 - protein, 19 aa, Artificial
  Short Peptide
RWKKFLKIPPKFLKLALKF

SEQ ID NO: 934 - protein, 19 aa, Artificial
  Short Peptide
FWKKFLKIPPKFLKLALKF

SEQ ID NO: 935 - protein, 19 aa, Artificial
  Short Peptide
KKKLLLKIPPKFLKLALKF

SEQ ID NO: 936 - protein, 19 aa, Artificial
  Short Peptide
RKKLLLKIPPKFLKLALKF

SEQ ID NO: 937 - protein, 19 aa, Artificial
  Short Peptide
FKKLLLKIPPKFLKLALKF

SEQ ID NO: 938 - protein, 19 aa, Artificial
  Short Peptide
KWKLLLKIPPKFLKLALKF

SEQ ID NO: 939 - protein, 19 aa, Artificial
  Short Peptide
RWKLLLKIPPKFLKLALKF

SEQ ID NO: 940 - protein, 19 aa, Artificial
  Short Peptide
FWKLLLKIPPKFLKLALKF

SEQ ID NO: 941 - protein, 19 aa, Artificial
  Short Peptide
KKKKLLKIPPKFLKLALKF

SEQ ID NO: 942 - protein, 19 aa, Artificial
  Short Peptide
RKKKLLKIPPKFLKLALKF

SEQ ID NO: 943 - protein, 19 aa, Artificial
  Short Peptide
FKKKLLKIPPKFLKLALKF

SEQ ID NO: 944 - protein, 19 aa, Artificial
  Short Peptide
KWKKLLKIPPKFLKLALKF

SEQ ID NO: 945 - protein, 19 aa, Artificial
  Short Peptide
RWKKLLKIPPKFLKLALKF

SEQ ID NO: 946 - protein, 19 aa, Artificial
  Short Peptide
FWKKLLKIPPKFLKLALKF

SEQ ID NO: 947 - protein, 19 aa, Artificial
  Short Peptide
KKKLFKKIPPKFLKLALKF

SEQ ID NO: 948 - protein, 19 aa, Artificial
  Short Peptide
RKKLFKKIPPKFLKLALKF

SEQ ID NO: 949 - protein, 19 aa, Artificial
  Short Peptide
FKKLFKKIPPKFLKLALKF

SEQ ID NO: 950 - protein, 19 aa, Artificial
  Short Peptide
KWKLFKKIPPKFLKLALKF

SEQ ID NO: 951 - protein, 19 aa, Artificial
  Short Peptide
RWKLFKKIPPKFLKLALKF

SEQ ID NO: 952 - protein, 19 aa, Artificial
  Short Peptide
FWKLFKKIPPKFLKLALKF

SEQ ID NO: 953 - protein, 19 aa, Artificial
  Short Peptide
KKKKFKKIPPKFLKLALKF

SEQ ID NO: 954 - protein, 19 aa, Artificial
  Short Peptide
RKKKFKKIPPKFLKLALKF

SEQ ID NO: 955 - protein, 19 aa, Artificial
  Short Peptide
FKKKFKKIPPKFLKLALKF

SEQ ID NO: 956 - protein, 19 aa, Artificial
  Short Peptide
KWKKFKKIPPKFLKLALKF

SEQ ID NO: 957 - protein, 19 aa, Artificial
  Short Peptide
RWKKFKKIPPKFLKLALKF

SEQ ID NO: 958 - protein, 19 aa, Artificial
  Short Peptide
FWKKFKKIPPKFLKLALKF

SEQ ID NO: 959 - protein, 19 aa, Artificial
  Short Peptide
KKKLLKKIPPKFLKLALKF

SEQ ID NO: 960 - protein, 19 aa, Artificial
  Short Peptide
RKKLLKKIPPKFLKLALKF

SEQ ID NO: 961 - protein, 19 aa, Artificial
  Short Peptide
FKKLLKKIPPKFLKLALKF

SEQ ID NO: 962 - protein, 19 aa, Artificial
  Short Peptide
KWKLLKKIPPKFLKLALKF

SEQ ID NO: 963 - protein, 19 aa, Artificial
  Short Peptide
RWKLLKKIPPKFLKLALKF

SEQ ID NO: 964 - protein, 19 aa, Artificial
  Short Peptide
FWKLLKKIPPKFLKLALKF

SEQ ID NO: 965 - protein, 19 aa, Artificial
  Short Peptide
KKKKLKKIPPKFLKLALKF

SEQ ID NO: 966 - protein, 19 aa, Artificial
  Short Peptide
RKKKLKKIPPKFLKLALKF

SEQ ID NO: 967 - protein, 19 aa, Artificial
  Short Peptide
FKKKLKKIPPKFLKLALKF

SEQ ID NO: 968 - protein, 19 aa, Artificial
  Short Peptide
KWKKLKKIPPKFLKLALKF

SEQ ID NO: 969 - protein, 19 aa, Artificial
  Short Peptide
RWKKLKKIPPKFLKLALKF

SEQ ID NO: 970 - protein, 19 aa, Artificial
  Short Peptide
FWKKLKKIPPKFLKLALKF

SEQ ID NO: 971 - protein, 18 aa, Artificial
  Short Peptide
KKKLFLKIPKFLKLALKF

SEQ ID NO: 972 - protein, 18 aa, Artificial
  Short Peptide
RKKLFLKIPKFLKLALKF

SEQ ID NO: 973 - protein, 18 aa, Artificial
  Short Peptide
FKKLFLKIPKFLKLALKF

SEQ ID NO: 974 - protein, 18 aa, Artificial
  Short Peptide
KWKLFLKIPKFLKLALKF

SEQ ID NO: 975 - protein, 18 aa, Artificial
  Short Peptide
RWKLFLKIPKFLKLALKF

SEQ ID NO: 976 - protein, 18 aa, Artificial
  Short Peptide
FWKLFLKIPKFLKLALKF

SEQ ID NO: 977 - protein, 18 aa, Artificial
  Short Peptide
KKKKFLKIPKFLKLALKF

SEQ ID NO: 978 - protein, 18 aa, Artificial
  Short Peptide
RKKKFLKIPKFLKLALKF

SEQ ID NO: 979 - protein, 18 aa, Artificial
  Short Peptide
FKKKFLKIPKFLKLALKF

SEQ ID NO: 980 - protein, 18 aa, Artificial
  Short Peptide
KWKKFLKIPKFLKLALKF

SEQ ID NO: 981 - protein, 18 aa, Artificial
  Short Peptide
RWKKFLKIPKFLKLALKF

SEQ ID NO: 982 - protein, 18 aa, Artificial
  Short Peptide
FWKKFLKIPKFLKLALKF

SEQ ID NO: 983 - protein, 18 aa, Artificial
  Short Peptide
KKKLLLKIPKFLKLALKF

SEQ ID NO: 984 - protein, 18 aa, Artificial
  Short Peptide
RKKLLLKIPKFLKLALKF

SEQ ID NO: 985 - protein, 18 aa, Artificial
  Short Peptide
FKKLLLKIPKFLKLALKF

SEQ ID NO: 986 - protein, 18 aa, Artificial
  Short Peptide
KWKLLLKIPKFLKLALKF

SEQ ID NO: 987 - protein, 18 aa, Artificial
  Short Peptide
RWKLLLKIPKFLKLALKF

SEQ ID NO: 988 - protein, 18 aa, Artificial
  Short Peptide
FWKLLLKIPKFLKLALKF

SEQ ID NO: 989 - protein, 18 aa, Artificial
  Short Peptide
KKKKLLKIPKFLKLALKF

SEQ ID NO: 990 - protein, 18 aa, Artificial
  Short Peptide
RKKKLLKIPKFLKLALKF

SEQ ID NO: 991 - protein, 18 aa, Artificial
  Short Peptide
FKKKLLKIPKFLKLALKF

SEQ ID NO: 992 - protein, 18 aa, Artificial
  Short Peptide
KWKKLLKIPKFLKLALKF

SEQ ID NO: 993 - protein, 18 aa, Artificial
  Short Peptide
RWKKLLKIPKFLKLALKF

SEQ ID NO: 994 - protein, 18 aa, Artificial
  Short Peptide
FWKKLLKIPKFLKLALKF

SEQ ID NO: 995 - protein, 18 aa, Artificial
  Short Peptide
KKKLFKKIPKFLKLALKF

SEQ ID NO: 996 - protein, 18 aa, Artificial
  Short Peptide
RKKLFKKIPKFLKLALKF

SEQ ID NO: 997 - protein, 18 aa, Artificial
  Short Peptide
FKKLFKKIPKFLKLALKF

SEQ ID NO: 998 - protein, 18 aa, Artificial
  Short Peptide
KWKLFKKIPKFLKLALKF

SEQ ID NO: 999 - protein, 18 aa, Artificial
  Short Peptide
RWKLFKKIPKFLKLALKF

SEQ ID NO: 1000 - protein, 18 aa, Artificial
  Short Peptide
FWKLFKKIPKFLKLALKF

SEQ ID NO: 1001 - protein, 18 aa, Artificial
  Short Peptide
KKKKFKKIPKFLKLALKF

SEQ ID NO: 1002 - protein, 18 aa, Artificial
  Short Peptide
RKKKFKKIPKFLKLALKF

SEQ ID NO: 1003 - protein, 18 aa, Artificial
  Short Peptide
FKKKFKKIPKFLKLALKF

SEQ ID NO: 1004 - protein, 18 aa, Artificial
  Short Peptide
KWKKFKKIPKFLKLALKF

SEQ ID NO: 1005 - protein, 18 aa, Artificial
  Short Peptide
RWKKFKKIPKFLKLALKF

SEQ ID NO: 1006 - protein, 18 aa, Artificial
  Short Peptide
FWKKFKKIPKFLKLALKF

SEQ ID NO: 1007 - protein, 18 aa, Artificial
  Short Peptide
KKKLLKKIPKFLKLALKF

SEQ ID NO: 1008 - protein, 18 aa, Artificial
  Short Peptide
RKKLLKKIPKFLKLALKF

SEQ ID NO: 1009 - protein, 18 aa, Artificial
  Short Peptide
FKKLLKKIPKFLKLALKF

SEQ ID NO: 1010 - protein, 18 aa, Artificial
  Short Peptide
KWKLLKKIPKFLKLALKF

SEQ ID NO: 1011 - protein, 18 aa, Artificial
  Short Peptide
RWKLLKKIPKFLKLALKF

SEQ ID NO: 1012 - protein, 18 aa, Artificial
  Short Peptide
FWKLLKKIPKFLKLALKF

SEQ ID NO: 1013 - protein, 18 aa, Artificial
  Short Peptide
KKKKLKKIPKFLKLALKF

SEQ ID NO: 1014 - protein, 18 aa, Artificial
  Short Peptide
RKKKLKKIPKFLKLALKF

SEQ ID NO: 1015 - protein, 18 aa, Artificial
  Short Peptide
FKKKLKKIPKFLKLALKF

SEQ ID NO: 1016 - protein, 18 aa, Artificial
  Short Peptide
KWKKLKKIPKFLKLALKF

SEQ ID NO: 1017 - protein, 18 aa, Artificial
  Short Peptide
RWKKLKKIPKFLKLALKF

SEQ ID NO: 1018 - protein, 18 aa, Artificial
  Short Peptide
FWKKLKKIPKFLKLALKF

SEQ ID NO: 1019 - protein, 20 aa, Artificial
  Short Peptide
KKKLFLKIPPPKFKKLALKF

SEQ ID NO: 1020 - protein, 20 aa, Artificial
  Short Peptide
RKKLFLKIPPPKFKKLALKF

SEQ ID NO: 1021 - protein, 20 aa, Artificial
  Short Peptide
FKKLFLKIPPPKFKKLALKF

SEQ ID NO: 1022 - protein, 20 aa, Artificial
  Short Peptide
KWKLFLKIPPPKFKKLALKF

SEQ ID NO: 1023 - protein, 20 aa, Artificial
  Short Peptide
RWKLFLKIPPPKFKKLALKF

SEQ ID NO: 1024 - protein, 20 aa, Artificial
  Short Peptide
FWKLFLKIPPPKFKKLALKF

SEQ ID NO: 1025 - protein, 20 aa, Artificial
  Short Peptide
KKKKFLKIPPPKFKKLALKF

SEQ ID NO: 1026 - protein, 20 aa, Artificial
  Short Peptide
RKKKFLKIPPPKFKKLALKF

SEQ ID NO: 1027 - protein, 20 aa, Artificial
  Short Peptide
FKKKFLKIPPPKFKKLALKF

SEQ ID NO: 1028 - protein, 20 aa, Artificial
  Short Peptide
KWKKFLKIPPPKFKKLALKF

SEQ ID NO: 1029 - protein, 20 aa, Artificial
  Short Peptide
RWKKFLKIPPPKFKKLALKF

SEQ ID NO: 1030 - protein, 20 aa, Artificial
  Short Peptide
FWKKFLKIPPPKFKKLALKF

SEQ ID NO: 1031 - protein, 20 aa, Artificial
  Short Peptide
KKKLLLKIPPPKFKKLALKF

SEQ ID NO: 1032 - protein, 20 aa, Artificial
  Short Peptide
RKKLLLKIPPPKFKKLALKF

SEQ ID NO: 1033 - protein, 20 aa, Artificial
  Short Peptide
FKKLLLKIPPPKFKKLALKF

SEQ ID NO: 1034 - protein, 20 aa, Artificial
  Short Peptide
KWKLLLKIPPPKFKKLALKF

SEQ ID NO: 1035 - protein, 20 aa, Artificial
  Short Peptide
RWKLLLKIPPPKFKKLALKF

SEQ ID NO: 1036 - protein, 20 aa, Artificial
  Short Peptide
FWKLLLKIPPPKFKKLALKF

SEQ ID NO: 1037 - protein, 20 aa, Artificial
  Short Peptide
KKKKLLKIPPPKFKKLALKF

SEQ ID NO: 1038 - protein, 20 aa, Artificial
  Short Peptide
RKKKLLKIPPPKFKKLALKF

SEQ ID NO: 1039 - protein, 20 aa, Artificial
  Short Peptide
FKKKLLKIPPPKFKKLALKF

SEQ ID NO: 1040 - protein, 20 aa, Artificial
  Short Peptide
KWKKLLKIPPPKFKKLALKF

SEQ ID NO: 1041 - protein, 20 aa, Artificial
  Short Peptide
RWKKLLKIPPPKFKKLALKF

SEQ ID NO: 1042 - protein, 20 aa, Artificial
  Short Peptide
FWKKLLKIPPPKFKKLALKF

SEQ ID NO: 1043 - protein, 20 aa, Artificial
  Short Peptide
KKKLFKKIPPPKFKKLALKF

SEQ ID NO: 1044 - protein, 20 aa, Artificial
  Short Peptide
RKKLFKKIPPPKFKKLALKF

SEQ ID NO: 1045 - protein, 20 aa, Artificial
  Short Peptide
FKKLFKKIPPPKFKKLALKF

SEQ ID NO: 1046 - protein, 20 aa, Artificial
  Short Peptide
KWKLFKKIPPPKFKKLALKF

SEQ ID NO: 1047 - protein, 20 aa, Artificial
  Short Peptide
RWKLFKKIPPPKFKKLALKF

SEQ ID NO: 1048 - protein, 20 aa, Artificial
  Short Peptide
FWKLFKKIPPPKFKKLALKF

SEQ ID NO: 1049 - protein, 20 aa, Artificial
  Short Peptide
KKKKFKKIPPPKFKKLALKF

SEQ ID NO: 1050 - protein, 20 aa, Artificial
  Short Peptide
RKKKFKKIPPPKFKKLALKF

SEQ ID NO: 1051 - protein, 20 aa, Artificial
  Short Peptide
FKKKFKKIPPPKFKKLALKF

SEQ ID NO: 1052 - protein, 20 aa, Artificial
  Short Peptide
KWKKFKKIPPPKFKKLALKF

SEQ ID NO: 1053 - protein, 20 aa, Artificial
  Short Peptide
RWKKFKKIPPPKFKKLALKF

SEQ ID NO: 1054 - protein, 20 aa, Artificial
  Short Peptide
FWKKFKKIPPPKFKKLALKF

SEQ ID NO: 1055 - protein, 20 aa, Artificial
  Short Peptide
KKKLLKKIPPPKFKKLALKF

SEQ ID NO: 1056 - protein, 20 aa, Artificial
  Short Peptide
RKKLLKKIPPPKFKKLALKF

SEQ ID NO: 1057 - protein, 20 aa, Artificial
  Short Peptide
FKKLLKKIPPPKFKKLALKF

SEQ ID NO: 1058 - protein, 20 aa, Artificial
  Short Peptide
KWKLLKKIPPPKFKKLALKF

SEQ ID NO: 1059 - protein, 20 aa, Artificial
  Short Peptide
RWKLLKKIPPPKFKKLALKF

SEQ ID NO: 1060 - protein, 20 aa, Artificial
  Short Peptide
FWKLLKKIPPPKFKKLALKF

SEQ ID NO: 1061 - protein, 20 aa, Artificial
  Short Peptide
KKKKLKKIPPPKFKKLALKF

SEQ ID NO: 1062 - protein, 20 aa, Artificial
  Short Peptide
RKKKLKKIPPPKFKKLALKF

SEQ ID NO: 1063 - protein, 20 aa, Artificial
  Short Peptide
FKKKLKKIPPPKFKKLALKF

SEQ ID NO: 1064 - protein, 20 aa, Artificial
  Short Peptide
KWKKLKKIPPPKFKKLALKF

SEQ ID NO: 1065 - protein, 20 aa, Artificial
  Short Peptide
RWKKLKKIPPPKFKKLALKF

SEQ ID NO: 1066 - protein, 20 aa, Artificial
  Short Peptide
FWKKLKKIPPPKFKKLALKF

SEQ ID NO: 1067 - protein, 19 aa, Artificial
  Short Peptide
KKKLFLKIPPKFKKLALKF

SEQ ID NO: 1068 - protein, 19 aa, Artificial
  Short Peptide
RKKLFLKIPPKFKKLALKF

SEQ ID NO: 1069 - protein, 19 aa, Artificial
  Short Peptide
FKKLFLKIPPKFKKLALKF

SEQ ID NO: 1070 - protein, 19 aa, Artificial
  Short Peptide
KWKLFLKIPPKFKKLALKF

SEQ ID NO: 1071 - protein, 19 aa, Artificial
  Short Peptide
RWKLFLKIPPKFKKLALKF

SEQ ID NO: 1072 - protein, 19 aa, Artificial
  Short Peptide
FWKLFLKIPPKFKKLALKF

SEQ ID NO: 1073 - protein, 19 aa, Artificial
  Short Peptide
KKKKFLKIPPKFKKLALKF

SEQ ID NO: 1074 - protein, 19 aa, Artificial
  Short Peptide
RKKKFLKIPPKFKKLALKF

SEQ ID NO: 1075 - protein, 19 aa, Artificial
  Short Peptide
FKKKFLKIPPKFKKLALKF

SEQ ID NO: 1076 - protein, 19 aa, Artificial
  Short Peptide
KWKKFLKIPPKFKKLALKF

SEQ ID NO: 1077 - protein, 19 aa, Artificial
  Short Peptide
RWKKFLKIPPKFKKLALKF

SEQ ID NO: 1078 - protein, 19 aa, Artificial
  Short Peptide
FWKKFLKIPPKFKKLALKF

SEQ ID NO: 1079 - protein, 19 aa, Artificial
  Short Peptide
KKKLLLKIPPKFKKLALKF

SEQ ID NO: 1080 - protein, 19 aa, Artificial
  Short Peptide
RKKLLLKIPPKFKKLALKF

SEQ ID NO: 1081 - protein, 19 aa, Artificial
  Short Peptide
FKKLLLKIPPKFKKLALKF

SEQ ID NO: 1082 - protein, 19 aa, Artificial
  Short Peptide
KWKLLLKIPPKFKKLALKF

SEQ ID NO: 1083 - protein, 19 aa, Artificial
  Short Peptide
RWKLLLKIPPKFKKLALKF

SEQ ID NO: 1084 - protein, 19 aa, Artificial
  Short Peptide
FWKLLLKIPPKFKKLALKF

SEQ ID NO: 1085 - protein, 19 aa, Artificial
  Short Peptide
KKKKLLKIPPKFKKLALKF

SEQ ID NO: 1086 - protein, 19 aa, Artificial
  Short Peptide
RKKKLLKIPPKFKKLALKF

SEQ ID NO: 1087 - protein, 19 aa, Artificial
  Short Peptide
FKKKLLKIPPKFKKLALKF

SEQ ID NO: 1088 - protein, 19 aa, Artificial
  Short Peptide
KWKKLLKIPPKFKKLALKF

SEQ ID NO: 1089 - protein, 19 aa, Artificial
  Short Peptide
RWKKLLKIPPKFKKLALKF

SEQ ID NO: 1090 - protein, 19 aa, Artificial
  Short Peptide
FWKKLLKIPPKFKKLALKF

SEQ ID NO: 1091 - protein, 19 aa, Artificial
  Short Peptide
KKKLFKKIPPKFKKLALKF

SEQ ID NO: 1092 - protein, 19 aa, Artificial
  Short Peptide
RKKLFKKIPPKFKKLALKF

SEQ ID NO: 1093 - protein, 19 aa, Artificial
  Short Peptide
FKKLFKKIPPKFKKLALKF

SEQ ID NO: 1094 - protein, 19 aa, Artificial
  Short Peptide
KWKLFKKIPPKFKKLALKF

SEQ ID NO: 1095 - protein, 19 aa, Artificial
  Short Peptide
RWKLFKKIPPKFKKLALKF

SEQ ID NO: 1096 - protein, 19 aa, Artificial
  Short Peptide
FWKLFKKIPPKFKKLALKF

SEQ ID NO: 1097 - protein, 19 aa, Artificial
  Short Peptide
KKKKFKKIPPKFKKLALKF

SEQ ID NO: 1098 - protein, 19 aa, Artificial
  Short Peptide
RKKKFKKIPPKFKKLALKF

SEQ ID NO: 1099 - protein, 19 aa, Artificial
  Short Peptide
FKKKFKKIPPKFKKLALKF

SEQ ID NO: 1100 - protein, 19 aa, Artificial
  Short Peptide
KWKKFKKIPPKFKKLALKF

SEQ ID NO: 1101 - protein, 19 aa, Artificial
  Short Peptide
RWKKFKKIPPKFKKLALKF

SEQ ID NO: 1102 - protein, 19 aa, Artificial
  Short Peptide
FWKKFKKIPPKFKKLALKF

SEQ ID NO: 1103 - protein, 19 aa, Artificial
  Short Peptide
KKKLLKKIPPKFKKLALKF

SEQ ID NO: 1104 - protein, 19 aa, Artificial
  Short Peptide
RKKLLKKIPPKFKKLALKF

SEQ ID NO: 1105 - protein, 19 aa, Artificial
  Short Peptide
FKKLLKKIPPKFKKLALKF

SEQ ID NO: 1106 - protein, 19 aa, Artificial
  Short Peptide
KWKLLKKIPPKFKKLALKF

SEQ ID NO: 1107 - protein, 19 aa, Artificial
  Short Peptide
RWKLLKKIPPKFKKLALKF

SEQ ID NO: 1108 - protein, 19 aa, Artificial
  Short Peptide
FWKLLKKIPPKFKKLALKF

SEQ ID NO: 1109 - protein, 19 aa, Artificial
  Short Peptide
KKKKLKKIPPKFKKLALKF

SEQ ID NO: 1110 - protein, 19 aa, Artificial
  Short Peptide
RKKKLKKIPPKFKKLALKF

SEQ ID NO: 1111 - protein, 19 aa, Artificial
  Short Peptide
FKKKLKKIPPKFKKLALKF

SEQ ID NO: 1112 - protein, 19 aa, Artificial
  Short Peptide
KWKKLKKIPPKFKKLALKF

SEQ ID NO: 1113 - protein, 19 aa, Artificial
  Short Peptide
RWKKLKKIPPKFKKLALKF

SEQ ID NO: 1114 - protein, 19 aa, Artificial
  Short Peptide
FWKKLKKIPPKFKKLALKF

SEQ ID NO: 1115 - protein, 18 aa, Artificial
  Short Peptide
KKKLFLKIPKFKKLALKF

SEQ ID NO: 1116 - protein, 18 aa, Artificial
  Short Peptide
RKKLFLKIPKFKKLALKF

SEQ ID NO: 1117 - protein, 18 aa, Artificial
  Short Peptide
FKKLFLKIPKFKKLALKF

SEQ ID NO: 1118 - protein, 18 aa, Artificial
  Short Peptide
KWKLFLKIPKFKKLALKF

SEQ ID NO: 1119 - protein, 18 aa, Artificial
  Short Peptide
RWKLFLKIPKFKKLALKF

SEQ ID NO: 1120 - protein, 18 aa, Artificial
  Short Peptide
FWKLFLKIPKFKKLALKF

SEQ ID NO: 1121 - protein, 18 aa, Artificial
  Short Peptide
KKKKFLKIPKFKKLALKF

SEQ ID NO: 1122 - protein, 18 aa, Artificial
  Short Peptide
RKKKFLKIPKFKKLALKF

SEQ ID NO: 1123 - protein, 18 aa, Artificial
  Short Peptide
FKKKFLKIPKFKKLALKF

SEQ ID NO: 1124 - protein, 18 aa, Artificial
  Short Peptide
KWKKFLKIPKFKKLALKF

SEQ ID NO: 1125 - protein, 18 aa, Artificial
  Short Peptide
RWKKFLKIPKFKKLALKF

SEQ ID NO: 1126 - protein, 18 aa, Artificial
  Short Peptide
FWKKFLKIPKFKKLALKF

SEQ ID NO: 1127 - protein, 18 aa, Artificial
  Short Peptide
KKKLLLKIPKFKKLALKF

SEQ ID NO: 1128 - protein, 18 aa, Artificial
  Short Peptide
RKKLLLKIPKFKKLALKF

SEQ ID NO: 1129 - protein, 18 aa, Artificial
  Short Peptide
FKKLLLKIPKFKKLALKF

SEQ ID NO: 1130 - protein, 18 aa, Artificial
  Short Peptide
KWKLLLKIPKFKKLALKF

SEQ ID NO: 1131 - protein, 18 aa, Artificial
  Short Peptide
RWKLLLKIPKFKKLALKF

SEQ ID NO: 1132 - protein, 18 aa, Artificial
  Short Peptide
FWKLLLKIPKFKKLALKF

SEQ ID NO: 1133 - protein, 18 aa, Artificial
  Short Peptide
KKKKLLKIPKFKKLALKF

SEQ ID NO: 1134 - protein, 18 aa, Artificial
  Short Peptide
RKKKLLKIPKFKKLALKF

SEQ ID NO: 1135 - protein, 18 aa, Artificial
  Short Peptide
FKKKLLKIPKFKKLALKF

SEQ ID NO: 1136 - protein, 18 aa, Artificial
  Short Peptide
KWKKLLKIPKFKKLALKF

SEQ ID NO: 1137 - protein, 18 aa, Artificial
  Short Peptide
RWKKLLKIPKFKKLALKF

SEQ ID NO: 1138 - protein, 18 aa, Artificial
  Short Peptide
FWKKLLKIPKFKKLALKF

SEQ ID NO: 1139 - protein, 18 aa, Artificial
  Short Peptide
KKKLFKKIPKFKKLALKF

SEQ ID NO: 1140 - protein, 18 aa, Artificial
  Short Peptide
RKKLFKKIPKFKKLALKF

SEQ ID NO: 1141 - protein, 18 aa, Artificial
  Short Peptide
FKKLFKKIPKFKKLALKF

SEQ ID NO: 1142 - protein, 18 aa, Artificial
  Short Peptide
KWKLFKKIPKFKKLALKF

SEQ ID NO: 1143 - protein, 18 aa, Artificial
  Short Peptide
RWKLFKKIPKFKKLALKF

SEQ ID NO: 1144 - protein, 18 aa, Artificial
  Short Peptide
FWKLFKKIPKFKKLALKF

SEQ ID NO: 1145 - protein, 18 aa, Artificial
  Short Peptide
KKKKFKKIPKFKKLALKF

SEQ ID NO: 1146 - protein, 18 aa, Artificial
  Short Peptide
RKKKFKKIPKFKKLALKF

SEQ ID NO: 1147 - protein, 18 aa, Artificial
  Short Peptide
FKKKFKKIPKFKKLALKF

SEQ ID NO: 1148 - protein, 18 aa, Artificial
  Short Peptide
KWKKFKKIPKFKKLALKF

SEQ ID NO: 1149 - protein, 18 aa, Artificial
  Short Peptide
RWKKFKKIPKFKKLALKF

SEQ ID NO: 1150 - protein, 18 aa, Artificial
  Short Peptide
FWKKFKKIPKFKKLALKF

SEQ ID NO: 1151 - protein, 18 aa, Artificial
  Short Peptide
KKKLLKKIPKFKKLALKF

SEQ ID NO: 1152 - protein, 18 aa, Artificial
  Short Peptide
RKKLLKKIPKFKKLALKF

SEQ ID NO: 1153 - protein, 18 aa, Artificial
  Short Peptide
FKKLLKKIPKFKKLALKF

SEQ ID NO: 1154 - protein, 18 aa, Artificial
  Short Peptide
RWKLLKKIPKFKKLALKF

SEQ ID NO: 1155 - protein, 18 aa, Artificial
  Short Peptide
FWKLLKKIPKFKKLALKF

SEQ ID NO: 1156 - protein, 18 aa, Artificial
  Short Peptide
KKKKLKKIPKFKKLALKF

SEQ ID NO: 1157 - protein, 18 aa, Artificial
  Short Peptide
RKKKLKKIPKFKKLALKF

SEQ ID NO: 1158 - protein, 18 aa, Artificial
  Short Peptide
FKKKLKKIPKFKKLALKF

SEQ ID NO: 1159 - protein, 18 aa, Artificial
  Short Peptide
KWKKLKKIPKFKKLALKF

SEQ ID NO: 1160 - protein, 18 aa, Artificial
  Short Peptide
RWKKLKKIPKFKKLALKF

SEQ ID NO: 1161 - protein, 18 aa, Artificial
  Short Peptide
FWKKLKKIPKFKKLALKF

SEQ ID NO: 1162 - protein, 20 aa, Artificial
  Short Peptide
KKKLFLKIPPPKFLHVALKF

SEQ ID NO: 1163 - protein, 20 aa, Artificial
  Short Peptide
RKKLFLKIPPPKFLHVALKF

SEQ ID NO: 1164 - protein, 20 aa, Artificial
  Short Peptide
FKKLFLKIPPPKFLHVALKF

SEQ ID NO: 1165 - protein, 20 aa, Artificial
  Short Peptide
KWKLFLKIPPPKFLHVALKF

SEQ ID NO: 1166 - protein, 20 aa, Artificial
  Short Peptide
RWKLFLKIPPPKFLHVALKF

SEQ ID NO: 1167 - protein, 20 aa, Artificial
  Short Peptide
FWKLFLKIPPPKFLHVALKF

SEQ ID NO: 1168 - protein, 20 aa, Artificial
  Short Peptide
KKKKFLKIPPPKFLHVALKF

SEQ ID NO: 1169 - protein, 20 aa, Artificial
  Short Peptide
RKKKFLKIPPPKFLHVALKF

SEQ ID NO: 1170 - protein, 20 aa, Artificial
  Short Peptide
FKKKFLKIPPPKFLHVALKF

SEQ ID NO: 1171 - protein, 20 aa, Artificial
  Short Peptide
KWKKFLKIPPPKFLHVALKF

SEQ ID NO: 1172 - protein, 20 aa, Artificial
  Short Peptide
RWKKFLKIPPPKFLHVALKF

SEQ ID NO: 1173 - protein, 20 aa, Artificial
  Short Peptide
FWKKFLKIPPPKFLHVALKF

SEQ ID NO: 1174 - protein, 20 aa, Artificial
  Short Peptide
KKKLLLKIPPPKFLHVALKF

SEQ ID NO: 1175 - protein, 20 aa, Artificial
  Short Peptide
RKKLLLKIPPPKFLHVALKF

SEQ ID NO: 1176 - protein, 20 aa, Artificial
  Short Peptide
FKKLLLKIPPPKFLHVALKF

SEQ ID NO: 1177 - protein, 20 aa, Artificial
  Short Peptide
KWKLLLKIPPPKFLHVALKF

SEQ ID NO: 1178 - protein, 20 aa, Artificial
  Short Peptide
RWKLLLKIPPPKFLHVALKF

SEQ ID NO: 1179 - protein, 20 aa, Artificial
  Short Peptide
FWKLLLKIPPPKFLHVALKF

SEQ ID NO: 1180 - protein, 20 aa, Artificial
  Short Peptide
KKKKLLKIPPPKFLHVALKF

SEQ ID NO: 1181 - protein, 20 aa, Artificial
  Short Peptide
RKKKLLKIPPPKFLHVALKF

SEQ ID NO: 1182 - protein, 20 aa, Artificial
  Short Peptide
FKKKLLKIPPPKFLHVALKF

SEQ ID NO: 1183 - protein, 20 aa, Artificial
  Short Peptide
KWKKLLKIPPPKFLHVALKF

SEQ ID NO: 1184 - protein, 20 aa, Artificial
  Short Peptide
RWKKLLKIPPPKFLHVALKF

SEQ ID NO: 1185 - protein, 20 aa, Artificial
  Short Peptide
FWKKLLKIPPPKFLHVALKF

SEQ ID NO: 1186 - protein, 20 aa, Artificial
  Short Peptide
KKKLFKKIPPPKFLHVALKF

SEQ ID NO: 1187 - protein, 20 aa, Artificial
  Short Peptide
RKKLFKKIPPPKFLHVALKF

SEQ ID NO: 1188 - protein, 20 aa, Artificial
  Short Peptide
FKKLFKKIPPPKFLHVALKF

SEQ ID NO: 1189 - protein, 20 aa, Artificial
  Short Peptide
KWKLFKKIPPPKFLHVALKF

SEQ ID NO: 1190 - protein, 20 aa, Artificial
  Short Peptide
RWKLFKKIPPPKFLHVALKF

SEQ ID NO: 1191 - protein, 20 aa, Artificial
  Short Peptide
FWKLFKKIPPPKFLHVALKF

SEQ ID NO: 1192 - protein, 20 aa, Artificial
  Short Peptide
KKKKFKKIPPPKFLHVALKF

SEQ ID NO: 1193 - protein, 20 aa, Artificial
  Short Peptide
RKKKFKKIPPPKFLHVALKF

SEQ ID NO: 1194 - protein, 20 aa, Artificial
  Short Peptide
FKKKFKKIPPPKFLHVALKF

SEQ ID NO: 1195 - protein, 20 aa, Artificial
  Short Peptide
KWKKFKKIPPPKFLHVALKF

SEQ ID NO: 1196 - protein, 20 aa, Artificial
  Short Peptide
RWKKFKKIPPPKFLHVALKF

SEQ ID NO: 1197 - protein, 20 aa, Artificial
  Short Peptide
FWKKFKKIPPPKFLHVALKF

SEQ ID NO: 1198 - protein, 20 aa, Artificial
  Short Peptide
KKKLLKKIPPPKFLHVALKF

SEQ ID NO: 1199 - protein, 20 aa, Artificial
  Short Peptide
RKKLLKKIPPPKFLHVALKF

SEQ ID NO: 1200 - protein, 20 aa, Artificial
  Short Peptide
FKKLLKKIPPPKFLHVALKF

SEQ ID NO: 1201 - protein, 20 aa, Artificial
  Short Peptide
KWKLLKKIPPPKFLHVALKF

SEQ ID NO: 1202 - protein, 20 aa, Artificial
  Short Peptide
RWKLLKKIPPPKFLHVALKF

SEQ ID NO: 1203 - protein, 20 aa, Artificial
  Short Peptide
FWKLLKKIPPPKFLHVALKF

SEQ ID NO: 1204 - protein, 20 aa, Artificial
  Short Peptide
KKKKLKKIPPPKFLHVALKF

SEQ ID NO: 1205 - protein, 20 aa, Artificial
  Short Peptide
RKKKLKKIPPPKFLHVALKF

SEQ ID NO: 1206 - protein, 20 aa, Artificial
  Short Peptide
FKKKLKKIPPPKFLHVALKF

SEQ ID NO: 1207 - protein, 20 aa, Artificial
  Short Peptide
KWKKLKKIPPPKFLHVALKF

SEQ ID NO: 1208 - protein, 20 aa, Artificial
  Short Peptide
RWKKLKKIPPPKFLHVALKF

SEQ ID NO: 1209 - protein, 20 aa, Artificial
  Short Peptide
FWKKLKKIPPPKFLHVALKF

SEQ ID NO: 1210 - protein, 19 aa, Artificial
  Short Peptide
KKKLFLKIPPKFLHVALKF

SEQ ID NO: 1211 - protein, 19 aa, Artificial
  Short Peptide
RKKLFLKIPPKFLHVALKF

SEQ ID NO: 1212 - protein, 19 aa, Artificial
  Short Peptide
FKKLFLKIPPKFLHVALKF

SEQ ID NO: 1213 - protein, 19 aa, Artificial
  Short Peptide
KWKLFLKIPPKFLHVALKF

SEQ ID NO: 1214 - protein, 19 aa, Artificial
  Short Peptide
RWKLFLKIPPKFLHVALKF

SEQ ID NO: 1215 - protein, 19 aa, Artificial
  Short Peptide
FWKLFLKIPPKFLHVALKF

SEQ ID NO: 1216 - protein, 19 aa, Artificial
  Short Peptide
KKKKFLKIPPKFLHVALKF

SEQ ID NO: 1217 - protein, 19 aa, Artificial
  Short Peptide
RKKKFLKIPPKFLHVALKF

SEQ ID NO: 1218 - protein, 19 aa, Artificial
  Short Peptide
FKKKFLKIPPKFLHVALKF

SEQ ID NO: 1219 - protein, 19 aa, Artificial
  Short Peptide
KWKKFLKIPPKFLHVALKF

SEQ ID NO: 1220 - protein, 19 aa, Artificial
  Short Peptide
RWKKFLKIPPKFLHVALKF

SEQ ID NO: 1221 - protein, 19 aa, Artificial
  Short Peptide
FWKKFLKIPPKFLHVALKF

SEQ ID NO: 1222 - protein, 19 aa, Artificial
  Short Peptide
KKKLLLKIPPKFLHVALKF

SEQ ID NO: 1223 - protein, 19 aa, Artificial
  Short Peptide
RKKLLLKIPPKFLHVALKF

SEQ ID NO: 1224 - protein, 19 aa, Artificial
  Short Peptide
FKKLLLKIPPKFLHVALKF

SEQ ID NO: 1225 - protein, 19 aa, Artificial
  Short Peptide
KWKLLLKIPPKFLHVALKF

SEQ ID NO: 1226 - protein, 19 aa, Artificial
  Short Peptide
RWKLLLKIPPKFLHVALKF

SEQ ID NO: 1227 - protein, 19 aa, Artificial
  Short Peptide
FWKLLLKIPPKFLHVALKF

SEQ ID NO: 1228 - protein, 19 aa, Artificial
  Short Peptide
KKKKLLKIPPKFLHVALKF

SEQ ID NO: 1229 - protein, 19 aa, Artificial
  Short Peptide
RKKKLLKIPPKFLHVALKF

SEQ ID NO: 1230 - protein, 19 aa, Artificial
  Short Peptide
FKKKLLKIPPKFLHVALKF

SEQ ID NO: 1231 - protein, 19 aa, Artificial
  Short Peptide
KWKKLLKIPPKFLHVALKF

SEQ ID NO: 1232 - protein, 19 aa, Artificial
  Short Peptide
RWKKLLKIPPKFLHVALKF

SEQ ID NO: 1233 - protein, 19 aa, Artificial
  Short Peptide
FWKKLLKIPPKFLHVALKF

SEQ ID NO: 1234 - protein, 19 aa, Artificial
  Short Peptide
KKKLFKKIPPKFLHVALKF

SEQ ID NO: 1235 - protein, 19 aa, Artificial
  Short Peptide
RKKLFKKIPPKFLHVALKF

SEQ ID NO: 1236 - protein, 19 aa, Artificial
  Short Peptide
FKKLFKKIPPKFLHVALKF

SEQ ID NO: 1237 - protein, 19 aa, Artificial
  Short Peptide
KWKLFKKIPPKFLHVALKF

SEQ ID NO: 1238 - protein, 19 aa, Artificial
  Short Peptide
RWKLFKKIPPKFLHVALKF

SEQ ID NO: 1239 - protein, 19 aa, Artificial
  Short Peptide
FWKLFKKIPPKFLHVALKF

SEQ ID NO: 1240 - protein, 19 aa, Artificial
  Short Peptide
KKKKFKKIPPKFLHVALKF

SEQ ID NO: 1241 - protein, 19 aa, Artificial
  Short Peptide
RKKKFKKIPPKFLHVALKF

SEQ ID NO: 1242 - protein, 19 aa, Artificial
  Short Peptide
FKKKFKKIPPKFLHVALKF

SEQ ID NO: 1243 - protein, 19 aa, Artificial
  Short Peptide
KWKKFKKIPPKFLHVALKF

SEQ ID NO: 1244 - protein, 19 aa, Artificial
  Short Peptide
RWKKFKKIPPKFLHVALKF

SEQ ID NO: 1245 - protein, 19 aa, Artificial
  Short Peptide
FWKKFKKIPPKFLHVALKF

SEQ ID NO: 1246 - protein, 19 aa, Artificial
  Short Peptide
KKKLLKKIPPKFLHVALKF

SEQ ID NO: 1247 - protein, 19 aa, Artificial
  Short Peptide
RKKLLKKIPPKFLHVALKF

SEQ ID NO: 1248 - protein, 19 aa, Artificial
  Short Peptide
FKKLLKKIPPKFLHVALKF

SEQ ID NO: 1249 - protein, 19 aa, Artificial
  Short Peptide
KWKLLKKIPPKFLHVALKF

SEQ ID NO: 1250 - protein, 19 aa, Artificial
  Short Peptide
RWKLLKKIPPKFLHVALKF

SEQ ID NO: 1251 - protein, 19 aa, Artificial
  Short Peptide
FWKLLKKIPPKFLHVALKF

SEQ ID NO: 1252 - protein, 19 aa, Artificial
  Short Peptide
KKKKLKKIPPKFLHVALKF

SEQ ID NO: 1253 - protein, 19 aa, Artificial
  Short Peptide
RKKKLKKIPPKFLHVALKF

SEQ ID NO: 1254 - protein, 19 aa, Artificial
  Short Peptide
FKKKLKKIPPKFLHVALKF

SEQ ID NO: 1255 - protein, 19 aa, Artificial
  Short Peptide
KWKKLKKIPPKFLHVALKF

SEQ ID NO: 1256 - protein, 19 aa, Artificial
  Short Peptide
RWKKLKKIPPKFLHVALKF

SEQ ID NO: 1257 - protein, 19 aa, Artificial
  Short Peptide
FWKKLKKIPPKFLHVALKF

SEQ ID NO: 1258 - protein, 18 aa, Artificial
  Short Peptide
KKKLFLKIPKFLHVALKF

SEQ ID NO: 1259 - protein, 18 aa, Artificial
  Short Peptide
RKKLFLKIPKFLHVALKF

SEQ ID NO: 1260 - protein, 18 aa, Artificial
  Short Peptide
FKKLFLKIPKFLHVALKF

SEQ ID NO: 1261 - protein, 18 aa, Artificial
  Short Peptide
KWKLFLKIPKFLHVALKF

SEQ ID NO: 1262 - protein, 18 aa, Artificial
  Short Peptide
RWKLFLKIPKFLHVALKF

SEQ ID NO: 1263 - protein, 18 aa, Artificial
  Short Peptide
FWKLFLKIPKFLHVALKF

SEQ ID NO: 1264 - protein, 18 aa, Artificial
  Short Peptide
KKKKFLKIPKFLHVALKF

SEQ ID NO: 1265 - protein, 18 aa, Artificial
  Short Peptide
RKKKFLKIPKFLHVALKF

SEQ ID NO: 1266 - protein, 18 aa, Artificial
  Short Peptide
FKKKFLKIPKFLHVALKF

SEQ ID NO: 1267 - protein, 18 aa, Artificial
  Short Peptide
KWKKFLKIPKFLHVALKF

SEQ ID NO: 1268 - protein, 18 aa, Artificial
  Short Peptide
RWKKFLKIPKFLHVALKF

SEQ ID NO: 1269 - protein, 18 aa, Artificial
  Short Peptide
FWKKFLKIPKFLHVALKF

SEQ ID NO: 1270 - protein, 18 aa, Artificial
  Short Peptide
KKKLLLKIPKFLHVALKF

SEQ ID NO: 1271 - protein, 18 aa, Artificial
  Short Peptide
RKKLLLKIPKFLHVALKF

SEQ ID NO: 1272 - protein, 18 aa, Artificial
  Short Peptide
FKKLLLKIPKFLHVALKF

SEQ ID NO: 1273 - protein, 18 aa, Artificial
  Short Peptide
KWKLLLKIPKFLHVALKF

SEQ ID NO: 1274 - protein, 18 aa, Artificial
  Short Peptide
RWKLLLKIPKFLHVALKF

SEQ ID NO: 1275 - protein, 18 aa, Artificial
  Short Peptide
FWKLLLKIPKFLHVALKF

SEQ ID NO: 1276 - protein, 18 aa, Artificial
  Short Peptide
KKKKLLKIPKFLHVALKF

SEQ ID NO: 1277 - protein, 18 aa, Artificial
  Short Peptide
RKKKLLKIPKFLHVALKF

SEQ ID NO: 1278 - protein, 18 aa, Artificial
  Short Peptide
FKKKLLKIPKFLHVALKF

SEQ ID NO: 1279 - protein, 18 aa, Artificial
  Short Peptide
KWKKLLKIPKFLHVALKF

SEQ ID NO: 1280 - protein, 18 aa, Artificial
  Short Peptide
RWKKLLKIPKFLHVALKF

SEQ ID NO: 1281 - protein, 18 aa, Artificial
  Short Peptide
FWKKLLKIPKFLHVALKF

SEQ ID NO: 1282 - protein, 18 aa, Artificial
  Short Peptide
KKKLFKKIPKFLHVALKF

SEQ ID NO: 1283 - protein, 18 aa, Artificial
  Short Peptide
RKKLFKKIPKFLHVALKF

SEQ ID NO: 1284 - protein, 18 aa, Artificial
  Short Peptide
FKKLFKKIPKFLHVALKF

SEQ ID NO: 1285 - protein, 18 aa, Artificial
  Short Peptide
KWKLFKKIPKFLHVALKF

SEQ ID NO: 1286 - protein, 18 aa, Artificial
  Short Peptide
RWKLFKKIPKFLHVALKF

SEQ ID NO: 1287 - protein, 18 aa, Artificial
  Short Peptide
FWKLFKKIPKFLHVALKF

SEQ ID NO: 1288 - protein, 18 aa, Artificial
  Short Peptide
KKKKFKKIPKFLHVALKF

SEQ ID NO: 1289 - protein, 18 aa, Artificial
  Short Peptide
RKKKFKKIPKFLHVALKF

SEQ ID NO: 1290 - protein, 18 aa, Artificial
  Short Peptide
FKKKFKKIPKFLHVALKF

SEQ ID NO: 1291 - protein, 18 aa, Artificial
  Short Peptide
KWKKFKKIPKFLHVALKF

SEQ ID NO: 1292 - protein, 18 aa, Artificial
  Short Peptide
RWKKFKKIPKFLHVALKF

SEQ ID NO: 1293 - protein, 18 aa, Artificial
  Short Peptide
FWKKFKKIPKFLHVALKF

SEQ ID NO: 1294 - protein, 18 aa, Artificial
  Short Peptide
KKKLLKKIPKFLHVALKF

SEQ ID NO: 1295 - protein, 18 aa, Artificial
  Short Peptide
RKKLLKKIPKFLHVALKF

SEQ ID NO: 1296 - protein, 18 aa, Artificial
  Short Peptide
FKKLLKKIPKFLHVALKF

SEQ ID NO: 1297 - protein, 18 aa, Artificial
  Short Peptide
KWKLLKKIPKFLHVALKF

SEQ ID NO: 1298 - protein, 18 aa, Artificial
  Short Peptide
RWKLLKKIPKFLHVALKF

SEQ ID NO: 1299 - protein, 18 aa, Artificial
  Short Peptide
FWKLLKKIPKFLHVALKF

SEQ ID NO: 1300 - protein, 18 aa, Artificial
  Short Peptide
KKKKLKKIPKFLHVALKF

SEQ ID NO: 1301 - protein, 18 aa, Artificial
  Short Peptide
RKKKLKKIPKFLHVALKF

SEQ ID NO: 1302 - protein, 18 aa, Artificial
  Short Peptide
FKKKLKKIPKFLHVALKF

SEQ ID NO: 1303 - protein, 18 aa, Artificial
  Short Peptide
KWKKLKKIPKFLHVALKF

SEQ ID NO: 1304 - protein, 18 aa, Artificial
  Short Peptide
RWKKLKKIPKFLHVALKF

SEQ ID NO: 1305 - protein, 18 aa, Artificial
  Short Peptide
FWKKLKKIPKFLHVALKF

SEQ ID NO: 1306 - protein, 20 aa, Artificial
  Short Peptide
KKKLFLKIPPPKFKHVALKF

SEQ ID NO: 1307 - protein, 20 aa, Artificial
  Short Peptide
RKKLFLKIPPPKFKHVALKF

SEQ ID NO: 1308 - protein, 20 aa, Artificial
  Short Peptide
FKKLFLKIPPPKFKHVALKF

SEQ ID NO: 1309 - protein, 20 aa, Artificial
  Short Peptide
KWKLFLKIPPPKFKHVALKF

SEQ ID NO: 1310 - protein, 20 aa, Artificial
  Short Peptide
RWKLFLKIPPPKFKHVALKF

SEQ ID NO: 1311 - protein, 20 aa, Artificial
  Short Peptide
FWKLFLKIPPPKFKHVALKF

SEQ ID NO: 1312 - protein, 20 aa, Artificial
  Short Peptide
KKKKFLKIPPPKFKHVALKF

SEQ ID NO: 1313 - protein, 20 aa, Artificial
  Short Peptide
RKKKFLKIPPPKFKHVALKF

SEQ ID NO: 1314 - protein, 20 aa, Artificial
  Short Peptide
FKKKFLKIPPPKFKHVALKF

SEQ ID NO: 1315 - protein, 20 aa, Artificial
  Short Peptide
KWKKFLKIPPPKFKHVALKF

SEQ ID NO: 1316 - protein, 20 aa, Artificial
  Short Peptide
RWKKFLKIPPPKFKHVALKF

SEQ ID NO: 1317 - protein, 20 aa, Artificial
  Short Peptide
FWKKFLKIPPPKFKHVALKF

SEQ ID NO: 1318 - protein, 20 aa, Artificial
  Short Peptide
KKKLLLKIPPPKFKHVALKF

SEQ ID NO: 1319 - protein, 20 aa, Artificial
  Short Peptide
RKKLLLKIPPPKFKHVALKF

SEQ ID NO: 1320 - protein, 20 aa, Artificial
  Short Peptide
FKKLLLKIPPPKFKHVALKF

SEQ ID NO: 1321 - protein, 20 aa, Artificial
  Short Peptide
KWKLLLKIPPPKFKHVALKF

SEQ ID NO: 1322 - protein, 20 aa, Artificial
  Short Peptide
RWKLLLKIPPPKFKHVALKF

SEQ ID NO: 1323 - protein, 20 aa, Artificial
  Short Peptide
FWKLLLKIPPPKFKHVALKF

SEQ ID NO: 1324 - protein, 20 aa, Artificial
  Short Peptide
KKKKLLKIPPPKFKHVALKF

SEQ ID NO: 1325 - protein, 20 aa, Artificial
  Short Peptide
RKKKLLKIPPPKFKHVALKF

SEQ ID NO: 1326 - protein, 20 aa, Artificial
  Short Peptide
FKKKLLKIPPPKFKHVALKF

SEQ ID NO: 1327 - protein, 20 aa, Artificial
  Short Peptide
KWKKLLKIPPPKFKHVALKF

SEQ ID NO: 1328 - protein, 20 aa, Artificial
  Short Peptide
RWKKLLKIPPPKFKHVALKF

SEQ ID NO: 1329 - protein, 20 aa, Artificial
  Short Peptide
FWKKLLKIPPPKFKHVALKF

SEQ ID NO: 1330 - protein, 20 aa, Artificial
  Short Peptide
KKKLFKKIPPPKFKHVALKF

SEQ ID NO: 1331 - protein, 20 aa, Artificial
  Short Peptide
RKKLFKKIPPPKFKHVALKF

SEQ ID NO: 1332 - protein, 20 aa, Artificial
  Short Peptide
FKKLFKKIPPPKFKHVALKF

SEQ ID NO: 1333 - protein, 20 aa, Artificial
  Short Peptide
KWKLFKKIPPPKFKHVALKF

SEQ ID NO: 1334 - protein, 20 aa, Artificial
  Short Peptide
RWKLFKKIPPPKFKHVALKF

SEQ ID NO: 1335 - protein, 20 aa, Artificial
  Short Peptide
FWKLFKKIPPPKFKHVALKF

SEQ ID NO: 1336 - protein, 20 aa, Artificial
  Short Peptide
KKKKFKKIPPPKFKHVALKF

SEQ ID NO: 1337 - protein, 20 aa, Artificial
  Short Peptide
RKKKFKKIPPPKFKHVALKF

SEQ ID NO: 1338 - protein, 20 aa, Artificial
  Short Peptide
FKKKFKKIPPPKFKHVALKF

SEQ ID NO: 1339 - protein, 20 aa, Artificial
  Short Peptide
KWKKFKKIPPPKFKHVALKF

SEQ ID NO: 1340 - protein, 20 aa, Artificial
  Short Peptide
RWKKFKKIPPPKFKHVALKF

SEQ ID NO: 1341 - protein, 20 aa, Artificial
  Short Peptide
FWKKFKKIPPPKFKHVALKF

SEQ ID NO: 1342 - protein, 20 aa, Artificial
  Short Peptide
KKKLLKKIPPPKFKHVALKF

SEQ ID NO: 1343 - protein, 20 aa, Artificial
  Short Peptide
RKKLLKKIPPPKFKHVALKF

SEQ ID NO: 1344 - protein, 20 aa, Artificial
  Short Peptide
FKKLLKKIPPPKFKHVALKF

SEQ ID NO: 1345 - protein, 20 aa, Artificial
  Short Peptide
KWKLLKKIPPPKFKHVALKF

SEQ ID NO: 1346 - protein, 20 aa, Artificial
  Short Peptide
RWKLLKKIPPPKFKHVALKF

SEQ ID NO: 1347 - protein, 20 aa, Artificial
  Short Peptide
FWKLLKKIPPPKFKHVALKF

SEQ ID NO: 1348 - protein, 20 aa, Artificial
  Short Peptide
KKKKLKKIPPPKFKHVALKF

SEQ ID NO: 1349 - protein, 20 aa, Artificial
  Short Peptide
RKKKLKKIPPPKFKHVALKF

SEQ ID NO: 1350 - protein, 20 aa, Artificial
  Short Peptide
FKKKLKKIPPPKFKHVALKF

SEQ ID NO: 1351 - protein, 20 aa, Artificial
  Short Peptide
KWKKLKKIPPPKFKHVALKF

SEQ ID NO: 1352 - protein, 20 aa, Artificial
  Short Peptide
RWKKLKKIPPPKFKHVALKF

SEQ ID NO: 1353 - protein, 20 aa, Artificial
  Short Peptide
FWKKLKKIPPPKFKHVALKF

SEQ ID NO: 1354 - protein, 19 aa, Artificial
  Short Peptide
KKKLFLKIPPKFKHVALKF

SEQ ID NO: 1355 - protein, 19 aa, Artificial
  Short Peptide
RKKLFLKIPPKFKHVALKF

SEQ ID NO: 1356 - protein, 19 aa, Artificial
  Short Peptide
FKKLFLKIPPKFKHVALKF

SEQ ID NO: 1357 - protein, 19 aa, Artificial
  Short Peptide
KWKLFLKIPPKFKHVALKF

SEQ ID NO: 1358 - protein, 19 aa, Artificial
  Short Peptide
RWKLFLKIPPKFKHVALKF

SEQ ID NO: 1359 - protein, 19 aa, Artificial
  Short Peptide
FWKLFLKIPPKFKHVALKF

SEQ ID NO: 1360 - protein, 19 aa, Artificial
  Short Peptide
KKKKFLKIPPKFKHVALKF

SEQ ID NO: 1361 - protein, 19 aa, Artificial
  Short Peptide
RKKKFLKIPPKFKHVALKF

SEQ ID NO: 1362 - protein, 19 aa, Artificial
  Short Peptide
FKKKFLKIPPKFKHVALKF

SEQ ID NO: 1363 - protein, 19 aa, Artificial
  Short Peptide
KWKKFLKIPPKFKHVALKF

SEQ ID NO: 1364 - protein, 19 aa, Artificial
  Short Peptide
RWKKFLKIPPKFKHVALKF

SEQ ID NO: 1365 - protein, 19 aa, Artificial
  Short Peptide
FWKKFLKIPPKFKHVALKF

SEQ ID NO: 1366 - protein, 19 aa, Artificial
  Short Peptide
KKKLLLKIPPKFKHVALKF

SEQ ID NO: 1367 - protein, 19 aa, Artificial
  Short Peptide
RKKLLLKIPPKFKHVALKF

SEQ ID NO: 1368 - protein, 19 aa, Artificial
  Short Peptide
FKKLLLKIPPKFKHVALKF

SEQ ID NO: 1369 - protein, 19 aa, Artificial
  Short Peptide
KWKLLLKIPPKFKHVALKF

SEQ ID NO: 1370 - protein, 19 aa, Artificial
  Short Peptide
RWKLLLKIPPKFKHVALKF

SEQ ID NO: 1371 - protein, 19 aa, Artificial
  Short Peptide
FWKLLLKIPPKFKHVALKF

SEQ ID NO: 1372 - protein, 19 aa, Artificial
  Short Peptide
KKKKLLKIPPKFKHVALKF

SEQ ID NO: 1373 - protein, 19 aa, Artificial
  Short Peptide
RKKKLLKIPPKFKHVALKF

SEQ ID NO: 1374 - protein, 19 aa, Artificial
  Short Peptide
FKKKLLKIPPKFKHVALKF

SEQ ID NO: 1375 - protein, 19 aa, Artificial
  Short Peptide
KWKKLLKIPPKFKHVALKF

SEQ ID NO: 1376 - protein, 19 aa, Artificial
  Short Peptide
RWKKLLKIPPKFKHVALKF

SEQ ID NO: 1377 - protein, 19 aa, Artificial
  Short Peptide
FWKKLLKIPPKFKHVALKF

SEQ ID NO: 1378 - protein, 19 aa, Artificial
  Short Peptide
KKKLFKKIPPKFKHVALKF

SEQ ID NO: 1379 - protein, 19 aa, Artificial
  Short Peptide
RKKLFKKIPPKFKHVALKF

SEQ ID NO: 1380 - protein, 19 aa, Artificial
  Short Peptide
FKKLFKKIPPKFKHVALKF

SEQ ID NO: 1381 - protein, 19 aa, Artificial
  Short Peptide
KWKLFKKIPPKFKHVALKF

SEQ ID NO: 1382 - protein, 19 aa, Artificial
  Short Peptide
RWKLFKKIPPKFKHVALKF

SEQ ID NO: 1383 - protein, 19 aa, Artificial
  Short Peptide
FWKLFKKIPPKFKHVALKF

SEQ ID NO: 1384 - protein, 19 aa, Artificial
  Short Peptide
KKKKFKKIPPKFKHVALKF

SEQ ID NO: 1385 - protein, 19 aa, Artificial
  Short Peptide
RKKKFKKIPPKFKHVALKF

SEQ ID NO: 1386 - protein, 19 aa, Artificial
  Short Peptide
FKKKFKKIPPKFKHVALKF

SEQ ID NO: 1387 - protein, 19 aa, Artificial
  Short Peptide
KWKKFKKIPPKFKHVALKF

SEQ ID NO: 1388 - protein, 19 aa, Artificial
  Short Peptide
RWKKFKKIPPKFKHVALKF

SEQ ID NO: 1389 - protein, 19 aa, Artificial
  Short Peptide
FWKKFKKIPPKFKHVALKF

SEQ ID NO: 1390 - protein, 19 aa, Artificial
  Short Peptide
KKKLLKKIPPKFKHVALKF

SEQ ID NO: 1391 - protein, 19 aa, Artificial
  Short Peptide
RKKLLKKIPPKFKHVALKF

SEQ ID NO: 1392 - protein, 19 aa, Artificial
  Short Peptide
FKKLLKKIPPKFKHVALKF

SEQ ID NO: 1393 - protein, 19 aa, Artificial
  Short Peptide
KWKLLKKIPPKFKHVALKF

SEQ ID NO: 1394 - protein, 19 aa, Artificial
  Short Peptide
RWKLLKKIPPKFKHVALKF

SEQ ID NO: 1395 - protein, 19 aa, Artificial
  Short Peptide
FWKLLKKIPPKFKHVALKF

SEQ ID NO: 1396 - protein, 19 aa, Artificial
  Short Peptide
KKKKLKKIPPKFKHVALKF

SEQ ID NO: 1397 - protein, 19 aa, Artificial
  Short Peptide
RKKKLKKIPPKFKHVALKF

SEQ ID NO: 1398 - protein, 19 aa, Artificial
  Short Peptide
FKKKLKKIPPKFKHVALKF

SEQ ID NO: 1399 - protein, 19 aa, Artificial
  Short Peptide
KWKKLKKIPPKFKHVALKF

SEQ ID NO: 1400 - protein, 19 aa, Artificial
  Short Peptide
RWKKLKKIPPKFKHVALKF

SEQ ID NO: 1401 - protein, 19 aa, Artificial
  Short Peptide
FWKKLKKIPPKFKHVALKF

SEQ ID NO: 1402 - protein, 18 aa, Artificial
  Short Peptide
KKKLFLKIPKFKHVALKF

SEQ ID NO: 1403 - protein, 18 aa, Artificial
  Short Peptide
RKKLFLKIPKFKHVALKF

SEQ ID NO: 1404 - protein, 18 aa, Artificial
  Short Peptide
FKKLFLKIPKFKHVALKF

SEQ ID NO: 1405 - protein, 18 aa, Artificial
  Short Peptide
KWKLFLKIPKFKHVALKF

SEQ ID NO: 1406 - protein, 18 aa, Artificial
  Short Peptide
RWKLFLKIPKFKHVALKF

SEQ ID NO: 1407 - protein, 18 aa, Artificial
  Short Peptide
FWKLFLKIPKFKHVALKF

SEQ ID NO: 1408 - protein, 18 aa, Artificial
  Short Peptide
KKKKFLKIPKFKHVALKF

SEQ ID NO: 1409 - protein, 18 aa, Artificial
  Short Peptide
RKKKFLKIPKFKHVALKF

SEQ ID NO: 1410 - protein, 18 aa, Artificial
  Short Peptide
FKKKFLKIPKFKHVALKF

SEQ ID NO: 1411 - protein, 18 aa, Artificial
  Short Peptide
KWKKFLKIPKFKHVALKF

SEQ ID NO: 1412 - protein, 18 aa, Artificial
  Short Peptide
RWKKFLKIPKFKHVALKF

SEQ ID NO: 1413 - protein, 18 aa, Artificial
  Short Peptide
FWKKFLKIPKFKHVALKF

SEQ ID NO: 1414 - protein, 18 aa, Artificial
  Short Peptide
KKKLLLKIPKFKHVALKF

SEQ ID NO: 1415 - protein, 18 aa, Artificial
  Short Peptide
RKKLLLKIPKFKHVALKF

SEQ ID NO: 1416 - protein, 18 aa, Artificial
  Short Peptide
FKKLLLKIPKFKHVALKF

SEQ ID NO: 1417 - protein, 18 aa, Artificial
  Short Peptide
KWKLLLKIPKFKHVALKF

SEQ ID NO: 1418 - protein, 18 aa, Artificial
  Short Peptide
RWKLLLKIPKFKHVALKF

SEQ ID NO: 1419 - protein, 18 aa, Artificial
  Short Peptide
FWKLLLKIPKFKHVALKF

SEQ ID NO: 1420 - protein, 18 aa, Artificial
  Short Peptide
KKKKLLKIPKFKHVALKF

SEQ ID NO: 1421 - protein, 18 aa, Artificial
  Short Peptide
RKKKLLKIPKFKHVALKF

SEQ ID NO: 1422 - protein, 18 aa, Artificial
  Short Peptide
FKKKLLKIPKFKHVALKF

SEQ ID NO: 1423 - protein, 18 aa, Artificial
  Short Peptide
KWKKLLKIPKFKHVALKF

SEQ ID NO: 1424 - protein, 18 aa, Artificial
  Short Peptide
RWKKLLKIPKFKHVALKF

SEQ ID NO: 1425 - protein, 18 aa, Artificial
  Short Peptide
FWKKLLKIPKFKHVALKF

SEQ ID NO: 1426 - protein, 18 aa, Artificial
  Short Peptide
KKKLFKKIPKFKHVALKF

SEQ ID NO: 1427 - protein, 18 aa, Artificial
  Short Peptide
RKKLFKKIPKFKHVALKF

SEQ ID NO: 1428 - protein, 18 aa, Artificial
  Short Peptide
FKKLFKKIPKFKHVALKF

SEQ ID NO: 1429 - protein, 18 aa, Artificial
  Short Peptide
KWKLFKKIPKFKHVALKF

SEQ ID NO: 1430 - protein, 18 aa, Artificial
  Short Peptide
RWKLFKKIPKFKHVALKF

SEQ ID NO: 1431 - protein, 18 aa, Artificial
  Short Peptide
FWKLFKKIPKFKHVALKF

SEQ ID NO: 1432 - protein, 18 aa, Artificial
  Short Peptide
KKKKFKKIPKFKHVALKF

SEQ ID NO: 1433 - protein, 18 aa, Artificial
  Short Peptide
RKKKFKKIPKFKHVALKF

SEQ ID NO: 1434 - protein, 18 aa, Artificial
  Short Peptide
FKKKFKKIPKFKHVALKF

SEQ ID NO: 1435 - protein, 18 aa, Artificial
  Short Peptide
KWKKFKKIPKFKHVALKF

SEQ ID NO: 1436 - protein, 18 aa, Artificial
  Short Peptide
RWKKFKKIPKFKHVALKF

SEQ ID NO: 1437 - protein, 18 aa, Artificial
  Short Peptide
FWKKFKKIPKFKHVALKF

SEQ ID NO: 1438 - protein, 18 aa, Artificial
  Short Peptide
KKKLLKKIPKFKHVALKF

SEQ ID NO: 1439 - protein, 18 aa, Artificial
  Short Peptide
RKKLLKKIPKFKHVALKF

SEQ ID NO: 1440 - protein, 18 aa, Artificial
  Short Peptide
FKKLLKKIPKFKHVALKF

SEQ ID NO: 1441 - protein, 18 aa, Artificial
  Short Peptide
KWKLLKKIPKFKHVALKF

SEQ ID NO: 1442 - protein, 18 aa, Artificial
  Short Peptide
RWKLLKKIPKFKHVALKF

SEQ ID NO: 1443 - protein, 18 aa, Artificial
  Short Peptide
FWKLLKKIPKFKHVALKF

SEQ ID NO: 1444 - protein, 18 aa, Artificial
  Short Peptide
KKKKLKKIPKFKHVALKF

SEQ ID NO: 1445 - protein, 18 aa, Artificial
  Short Peptide
RKKKLKKIPKFKHVALKF

SEQ ID NO: 1446 - protein, 18 aa, Artificial
  Short Peptide
FKKKLKKIPKFKHVALKF

SEQ ID NO: 1447 - protein, 18 aa, Artificial
  Short Peptide
KWKKLKKIPKFKHVALKF

SEQ ID NO: 1448 - protein, 18 aa, Artificial
  Short Peptide
RWKKLKKIPKFKHVALKF

SEQ ID NO: 1449 - protein, 18 aa, Artificial
  Short Peptide
FWKKLKKIPKFKHVALKF

SEQ ID NO: 1450 - protein, 20 aa, Artificial
  Short Peptide
KKKLFLKIPPPKFLKVALKF

SEQ ID NO: 1451 - protein, 20 aa, Artificial
  Short Peptide
RKKLFLKIPPPKFLKVALKF

SEQ ID NO: 1452 - protein, 20 aa, Artificial
  Short Peptide
FKKLFLKIPPPKFLKVALKF

SEQ ID NO: 1453 - protein, 20 aa, Artificial
  Short Peptide
KWKLFLKIPPPKFLKVALKF

SEQ ID NO: 1454 - protein, 20 aa, Artificial
  Short Peptide
RWKLFLKIPPPKFLKVALKF

SEQ ID NO: 1455 - protein, 20 aa, Artificial
  Short Peptide
FWKLFLKIPPPKFLKVALKF

SEQ ID NO: 1456 - protein, 20 aa, Artificial
  Short Peptide
KKKKFLKIPPPKFLKVALKF

SEQ ID NO: 1457 - protein, 20 aa, Artificial
  Short Peptide
RKKKFLKIPPPKFLKVALKF

SEQ ID NO: 1458 - protein, 20 aa, Artificial
  Short Peptide
FKKKFLKIPPPKFLKVALKF

SEQ ID NO: 1459 - protein, 20 aa, Artificial
  Short Peptide
KWKKFLKIPPPKFLKVALKF

SEQ ID NO: 1460 - protein, 20 aa, Artificial
  Short Peptide
RWKKFLKIPPPKFLKVALKF

SEQ ID NO: 1461 - protein, 20 aa, Artificial
  Short Peptide
FWKKFLKIPPPKFLKVALKF

SEQ ID NO: 1462 - protein, 20 aa, Artificial
  Short Peptide
KKKLLLKIPPPKFLKVALKF

SEQ ID NO: 1463 - protein, 20 aa, Artificial
  Short Peptide
RKKLLLKIPPPKFLKVALKF

SEQ ID NO: 1464 - protein, 20 aa, Artificial
  Short Peptide
FKKLLLKIPPPKFLKVALKF

SEQ ID NO: 1465 - protein, 20 aa, Artificial
  Short Peptide
KWKLLLKIPPPKFLKVALKF

SEQ ID NO: 1466 - protein, 20 aa, Artificial
  Short Peptide
RWKLLLKIPPPKFLKVALKF

SEQ ID NO: 1467 - protein, 20 aa, Artificial
  Short Peptide
FWKLLLKIPPPKFLKVALKF

SEQ ID NO: 1468 - protein, 20 aa, Artificial
  Short Peptide
KKKKLLKIPPPKFLKVALKF

SEQ ID NO: 1469 - protein, 20 aa, Artificial
  Short Peptide
RKKKLLKIPPPKFLKVALKF

SEQ ID NO: 1470 - protein, 20 aa, Artificial
  Short Peptide
FKKKLLKIPPPKFLKVALKF

SEQ ID NO: 1471 - protein, 20 aa, Artificial
  Short Peptide
KWKKLLKIPPPKFLKVALKF

SEQ ID NO: 1472 - protein, 20 aa, Artificial
  Short Peptide
RWKKLLKIPPPKFLKVALKF

SEQ ID NO: 1473 - protein, 20 aa, Artificial
  Short Peptide
FWKKLLKIPPPKFLKVALKF

SEQ ID NO: 1474 - protein, 20 aa, Artificial
  Short Peptide
KKKLFKKIPPPKFLKVALKF

SEQ ID NO: 1475 - protein, 20 aa, Artificial
  Short Peptide
RKKLFKKIPPPKFLKVALKF

SEQ ID NO: 1476 - protein, 20 aa, Artificial
  Short Peptide
FKKLFKKIPPPKFLKVALKF

SEQ ID NO: 1477 - protein, 20 aa, Artificial
  Short Peptide
KWKLFKKIPPPKFLKVALKF

SEQ ID NO: 1478 - protein, 20 aa, Artificial
  Short Peptide
RWKLFKKIPPPKFLKVALKF

SEQ ID NO: 1479 - protein, 20 aa, Artificial
  Short Peptide
FWKLFKKIPPPKFLKVALKF

SEQ ID NO: 1480 - protein, 20 aa, Artificial
  Short Peptide
KKKKFKKIPPPKFLKVALKF

SEQ ID NO: 1481 - protein, 20 aa, Artificial
  Short Peptide
RKKKFKKIPPPKFLKVALKF

SEQ ID NO: 1482 - protein, 20 aa, Artificial
  Short Peptide
FKKKFKKIPPPKFLKVALKF

SEQ ID NO: 1483 - protein, 20 aa, Artificial
  Short Peptide
KWKKFKKIPPPKFLKVALKF

SEQ ID NO: 1484 - protein, 20 aa, Artificial
  Short Peptide
RWKKFKKIPPPKFLKVALKF

SEQ ID NO: 1485 - protein, 20 aa, Artificial
  Short Peptide
FWKKFKKIPPPKFLKVALKF

SEQ ID NO: 1486 - protein, 20 aa, Artificial
  Short Peptide
KKKLLKKIPPPKFLKVALKF

SEQ ID NO: 1487 - protein, 20 aa, Artificial
  Short Peptide
RKKLLKKIPPPKFLKVALKF

SEQ ID NO: 1488 - protein, 20 aa, Artificial
  Short Peptide
FKKLLKKIPPPKFLKVALKF

SEQ ID NO: 1489 - protein, 20 aa, Artificial
  Short Peptide
KWKLLKKIPPPKFLKVALKF

SEQ ID NO: 1490 - protein, 20 aa, Artificial
  Short Peptide
RWKLLKKIPPPKFLKVALKF

SEQ ID NO: 1491 - protein, 20 aa, Artificial
  Short Peptide
FWKLLKKIPPPKFLKVALKF

SEQ ID NO: 1492 - protein, 20 aa, Artificial
  Short Peptide
KKKKLKKIPPPKFLKVALKF

SEQ ID NO: 1493 - protein, 20 aa, Artificial
  Short Peptide
RKKKLKKIPPPKFLKVALKF

SEQ ID NO: 1494 - protein, 20 aa, Artificial
  Short Peptide
FKKKLKKIPPPKFLKVALKF

SEQ ID NO: 1495 - protein, 20 aa, Artificial
  Short Peptide
KWKKLKKIPPPKFLKVALKF

SEQ ID NO: 1496 - protein, 20 aa, Artificial
  Short Peptide
RWKKLKKIPPPKFLKVALKF

SEQ ID NO: 1497 - protein, 20 aa, Artificial
  Short Peptide
FWKKLKKIPPPKFLKVALKF

SEQ ID NO: 1498 - protein, 19 aa, Artificial
  Short Peptide
KKKLFLKIPPKFLKVALKF

SEQ ID NO: 1499 - protein, 19 aa, Artificial
  Short Peptide
RKKLFLKIPPKFLKVALKF

SEQ ID NO: 1500 - protein, 19 aa, Artificial
  Short Peptide
FKKLFLKIPPKFLKVALKF

SEQ ID NO: 1501 - protein, 19 aa, Artificial
  Short Peptide
KWKLFLKIPPKFLKVALKF

SEQ ID NO: 1502 - protein, 19 aa, Artificial
  Short Peptide
RWKLFLKIPPKFLKVALKF

SEQ ID NO: 1503 - protein, 19 aa, Artificial
  Short Peptide
FWKLFLKIPPKFLKVALKF

SEQ ID NO: 1504 - protein, 19 aa, Artificial
  Short Peptide
KKKKFLKIPPKFLKVALKF

SEQ ID NO: 1505 - protein, 19 aa, Artificial
  Short Peptide
RKKKFLKIPPKFLKVALKF

SEQ ID NO: 1506 - protein, 19 aa, Artificial
  Short Peptide
FKKKFLKIPPKFLKVALKF

SEQ ID NO: 1507 - protein, 19 aa, Artificial
  Short Peptide
KWKKFLKIPPKFLKVALKF

SEQ ID NO: 1508 - protein, 19 aa, Artificial
  Short Peptide
RWKKFLKIPPKFLKVALKF

SEQ ID NO: 1509 - protein, 19 aa, Artificial
  Short Peptide
FWKKFLKIPPKFLKVALKF

SEQ ID NO: 1510 - protein, 19 aa, Artificial
  Short Peptide
KKKLLLKIPPKFLKVALKF

SEQ ID NO: 1511 - protein, 19 aa, Artificial
  Short Peptide
RKKLLLKIPPKFLKVALKF

SEQ ID NO: 1512 - protein, 19 aa, Artificial
  Short Peptide
FKKLLLKIPPKFLKVALKF

SEQ ID NO: 1513 - protein, 19 aa, Artificial
  Short Peptide
KWKLLLKIPPKFLKVALKF

SEQ ID NO: 1514 - protein, 19 aa, Artificial
  Short Peptide
RWKLLLKIPPKFLKVALKF

SEQ ID NO: 1515 - protein, 19 aa, Artificial
  Short Peptide
FWKLLLKIPPKFLKVALKF

SEQ ID NO: 1516 - protein, 19 aa, Artificial
  Short Peptide
KKKKLLKIPPKFLKVALKF

SEQ ID NO: 1517 - protein, 19 aa, Artificial
  Short Peptide
RKKKLLKIPPKFLKVALKF

SEQ ID NO: 1518 - protein, 19 aa, Artificial
  Short Peptide
FKKKLLKIPPKFLKVALKF

SEQ ID NO: 1519 - protein, 19 aa, Artificial
  Short Peptide
KWKKLLKIPPKFLKVALKF

SEQ ID NO: 1520 - protein, 19 aa, Artificial
  Short Peptide
RWKKLLKIPPKFLKVALKF

SEQ ID NO: 1521 - protein, 19 aa, Artificial
  Short Peptide
FWKKLLKIPPKFLKVALKF

SEQ ID NO: 1522 - protein, 19 aa, Artificial
  Short Peptide
KKKLFKKIPPKFLKVALKF

SEQ ID NO: 1523 - protein, 19 aa, Artificial
  Short Peptide
RKKLFKKIPPKFLKVALKF

SEQ ID NO: 1524 - protein, 19 aa, Artificial
  Short Peptide
FKKLFKKIPPKFLKVALKF

SEQ ID NO: 1525 - protein, 19 aa, Artificial
  Short Peptide
KWKLFKKIPPKFLKVALKF

SEQ ID NO: 1526 - protein, 19 aa, Artificial
  Short Peptide
RWKLFKKIPPKFLKVALKF

SEQ ID NO: 1527 - protein, 19 aa, Artificial
  Short Peptide
FWKLFKKIPPKFLKVALKF

SEQ ID NO: 1528 - protein, 19 aa, Artificial
  Short Peptide
KKKKFKKIPPKFLKVALKF

SEQ ID NO: 1529 - protein, 19 aa, Artificial
  Short Peptide
RKKKFKKIPPKFLKVALKF

SEQ ID NO: 1530 - protein, 19 aa, Artificial
  Short Peptide
FKKKFKKIPPKFLKVALKF

SEQ ID NO: 1531 - protein, 19 aa, Artificial
  Short Peptide
KWKKFKKIPPKFLKVALKF

SEQ ID NO: 1532 - protein, 19 aa, Artificial
  Short Peptide
RWKKFKKIPPKFLKVALKF

SEQ ID NO: 1533 - protein, 19 aa, Artificial
  Short Peptide
FWKKFKKIPPKFLKVALKF

SEQ ID NO: 1534 - protein, 19 aa, Artificial
  Short Peptide
KKKLLKKIPPKFLKVALKF

SEQ ID NO: 1535 - protein, 19 aa, Artificial
  Short Peptide
RKKLLKKIPPKFLKVALKF

SEQ ID NO: 1536 - protein, 19 aa, Artificial
  Short Peptide
FKKLLKKIPPKFLKVALKF

SEQ ID NO: 1537 - protein, 19 aa, Artificial
  Short Peptide
KWKLLKKIPPKFLKVALKF

SEQ ID NO: 1538 - protein, 19 aa, Artificial
  Short Peptide
RWKLLKKIPPKFLKVALKF

SEQ ID NO: 1539 - protein, 19 aa, Artificial
  Short Peptide
FWKLLKKIPPKFLKVALKF

SEQ ID NO: 1540 - protein, 19 aa, Artificial
  Short Peptide
KKKKLKKIPPKFLKVALKF

SEQ ID NO: 1541 - protein, 19 aa, Artificial
  Short Peptide
RKKKLKKIPPKFLKVALKF

SEQ ID NO: 1542 - protein, 19 aa, Artificial
  Short Peptide
FKKKLKKIPPKFLKVALKF

SEQ ID NO: 1543 - protein, 19 aa, Artificial
  Short Peptide
KWKKLKKIPPKFLKVALKF

SEQ ID NO: 1544 - protein, 19 aa, Artificial
  Short Peptide
RWKKLKKIPPKFLKVALKF

SEQ ID NO: 1545 - protein, 19 aa, Artificial
  Short Peptide
FWKKLKKIPPKFLKVALKF

SEQ ID NO: 1546 - protein, 18 aa, Artificial
  Short Peptide
KKKLFLKIPKFLKVALKF

SEQ ID NO: 1547 - protein, 18 aa, Artificial
  Short Peptide
RKKLFLKIPKFLKVALKF

SEQ ID NO: 1548 - protein, 18 aa, Artificial
  Short Peptide
FKKLFLKIPKFLKVALKF

SEQ ID NO: 1549 - protein, 18 aa, Artificial
  Short Peptide
KWKLFLKIPKFLKVALKF

SEQ ID NO: 1550 - protein, 18 aa, Artificial
  Short Peptide
RWKLFLKIPKFLKVALKF

SEQ ID NO: 1551 - protein, 18 aa, Artificial
  Short Peptide
FWKLFLKIPKFLKVALKF

SEQ ID NO: 1552 - protein, 18 aa, Artificial
  Short Peptide
KKKKFLKIPKFLKVALKF

SEQ ID NO: 1553 - protein, 18 aa, Artificial
  Short Peptide
RKKKFLKIPKFLKVALKF

SEQ ID NO: 1554 - protein, 18 aa, Artificial
  Short Peptide
FKKKFLKIPKFLKVALKF

SEQ ID NO: 1555 - protein, 18 aa, Artificial
  Short Peptide
KWKKFLKIPKFLKVALKF

SEQ ID NO: 1556 - protein, 18 aa, Artificial
  Short Peptide
RWKKFLKIPKFLKVALKF

SEQ ID NO: 1557 - protein, 18 aa, Artificial
  Short Peptide
FWKKFLKIPKFLKVALKF

SEQ ID NO: 1558 - protein, 18 aa, Artificial
  Short Peptide
KKKLLLKIPKFLKVALKF

SEQ ID NO: 1559 - protein, 18 aa, Artificial
  Short Peptide
RKKLLLKIPKFLKVALKF

SEQ ID NO: 1560 - protein, 18 aa, Artificial
  Short Peptide
FKKLLLKIPKFLKVALKF

SEQ ID NO: 1561 - protein, 18 aa, Artificial
  Short Peptide
KWKLLLKIPKFLKVALKF

SEQ ID NO: 1562 - protein, 18 aa, Artificial
  Short Peptide
RWKLLLKIPKFLKVALKF

SEQ ID NO: 1563 - protein, 18 aa, Artificial
  Short Peptide
FWKLLLKIPKFLKVALKF

SEQ ID NO: 1564 - protein, 18 aa, Artificial
  Short Peptide
KKKKLLKIPKFLKVALKF

SEQ ID NO: 1565 - protein, 18 aa, Artificial
  Short Peptide
RKKKLLKIPKFLKVALKF

SEQ ID NO: 1566 - protein, 18 aa, Artificial
  Short Peptide
FKKKLLKIPKFLKVALKF

SEQ ID NO: 1567 - protein, 18 aa, Artificial
  Short Peptide
KWKKLLKIPKFLKVALKF

SEQ ID NO: 1568 - protein, 18 aa, Artificial
  Short Peptide
RWKKLLKIPKFLKVALKF

SEQ ID NO: 1569 - protein, 18 aa, Artificial
  Short Peptide
FWKKLLKIPKFLKVALKF

SEQ ID NO: 1570 - protein, 18 aa, Artificial
  Short Peptide
KKKLFKKIPKFLKVALKF

SEQ ID NO: 1571 - protein, 18 aa, Artificial
  Short Peptide
RKKLFKKIPKFLKVALKF

SEQ ID NO: 1572 - protein, 18 aa, Artificial
  Short Peptide
FKKLFKKIPKFLKVALKF

SEQ ID NO: 1573 - protein, 18 aa, Artificial
  Short Peptide
KWKLFKKIPKFLKVALKF

SEQ ID NO: 1574 - protein, 18 aa, Artificial
  Short Peptide
RWKLFKKIPKFLKVALKF

SEQ ID NO: 1575 - protein, 18 aa, Artificial
  Short Peptide
FWKLFKKIPKFLKVALKF

SEQ ID NO: 1576 - protein, 18 aa, Artificial
  Short Peptide
KKKKFKKIPKFLKVALKF

SEQ ID NO: 1577 - protein, 18 aa, Artificial
  Short Peptide
RKKKFKKIPKFLKVALKF

SEQ ID NO: 1578 - protein, 18 aa, Artificial
  Short Peptide
FKKKFKKIPKFLKVALKF

SEQ ID NO: 1579 - protein, 18 aa, Artificial
  Short Peptide
KWKKFKKIPKFLKVALKF

SEQ ID NO: 1580 - protein, 18 aa, Artificial
  Short Peptide
RWKKFKKIPKFLKVALKF

SEQ ID NO: 1581 - protein, 18 aa, Artificial
  Short Peptide
FWKKFKKIPKFLKVALKF

SEQ ID NO: 1582 - protein, 18 aa, Artificial
  Short Peptide
KKKLLKKIPKFLKVALKF

SEQ ID NO: 1583 - protein, 18 aa, Artificial
  Short Peptide
RKKLLKKIPKFLKVALKF

SEQ ID NO: 1584 - protein, 18 aa, Artificial
  Short Peptide
FKKLLKKIPKFLKVALKF

SEQ ID NO: 1585 - protein, 18 aa, Artificial
  Short Peptide
KWKLLKKIPKFLKVALKF

SEQ ID NO: 1586 - protein, 18 aa, Artificial
  Short Peptide
RWKLLKKIPKFLKVALKF

SEQ ID NO: 1587 - protein, 18 aa, Artificial
  Short Peptide
FWKLLKKIPKFLKVALKF

SEQ ID NO: 1588 - protein, 18 aa, Artificial
  Short Peptide
KKKKLKKIPKFLKVALKF

SEQ ID NO: 1589 - protein, 18 aa, Artificial
  Short Peptide
RKKKLKKIPKFLKVALKF

SEQ ID NO: 1590 - protein, 18 aa, Artificial
  Short Peptide
FKKKLKKIPKFLKVALKF

SEQ ID NO: 1591 - protein, 18 aa, Artificial
  Short Peptide
KWKKLKKIPKFLKVALKF

SEQ ID NO: 1592 - protein, 18 aa, Artificial
  Short Peptide
RWKKLKKIPKFLKVALKF

SEQ ID NO: 1593 - protein, 18 aa, Artificial
  Short Peptide
FWKKLKKIPKFLKVALKF

SEQ ID NO: 1594 - protein, 20 aa, Artificial
  Short Peptide
KKKLFLKIPPPKFKKVALKF

SEQ ID NO: 1595 - protein, 20 aa, Artificial
  Short Peptide
RKKLFLKIPPPKFKKVALKF

SEQ ID NO: 1596 - protein, 20 aa, Artificial
  Short Peptide
FKKLFLKIPPPKFKKVALKF

SEQ ID NO: 1597 - protein, 20 aa, Artificial
  Short Peptide
KWKLFLKIPPPKFKKVALKF

SEQ ID NO: 1598 - protein, 20 aa, Artificial
  Short Peptide
RWKLFLKIPPPKFKKVALKF

SEQ ID NO: 1599 - protein, 20 aa, Artificial
  Short Peptide
FWKLFLKIPPPKFKKVALKF

SEQ ID NO: 1600 - protein, 20 aa, Artificial
  Short Peptide
KKKKFLKIPPPKFKKVALKF

SEQ ID NO: 1601 - protein, 20 aa, Artificial
  Short Peptide
RKKKFLKIPPPKFKKVALKF

SEQ ID NO: 1602 - protein, 20 aa, Artificial
  Short Peptide
FKKKFLKIPPPKFKKVALKF

SEQ ID NO: 1603 - protein, 20 aa, Artificial
  Short Peptide
KWKKFLKIPPPKFKKVALKF

SEQ ID NO: 1604 - protein, 20 aa, Artificial
  Short Peptide
RWKKFLKIPPPKFKKVALKF

SEQ ID NO: 1605 - protein, 20 aa, Artificial
  Short Peptide
FWKKFLKIPPPKFKKVALKF

SEQ ID NO: 1606 - protein, 20 aa, Artificial
  Short Peptide
KKKLLLKIPPPKFKKVALKF

SEQ ID NO: 1607 - protein, 20 aa, Artificial
  Short Peptide
RKKLLLKIPPPKFKKVALKF

SEQ ID NO: 1608 - protein, 20 aa, Artificial
  Short Peptide
FKKLLLKIPPPKFKKVALKF

SEQ ID NO: 1609 - protein, 20 aa, Artificial
  Short Peptide
KWKLLLKIPPPKFKKVALKF

SEQ ID NO: 1610 - protein, 20 aa, Artificial
  Short Peptide
RWKLLLKIPPPKFKKVALKF

SEQ ID NO: 1611 - protein, 20 aa, Artificial
  Short Peptide
FWKLLLKIPPPKFKKVALKF

SEQ ID NO: 1612 - protein, 20 aa, Artificial
  Short Peptide
KKKKLLKIPPPKFKKVALKF

SEQ ID NO: 1613 - protein, 20 aa, Artificial
  Short Peptide
RKKKLLKIPPPKFKKVALKF

SEQ ID NO: 1614 - protein, 20 aa, Artificial
  Short Peptide
FKKKLLKIPPPKFKKVALKF

SEQ ID NO: 1615 - protein, 20 aa, Artificial
  Short Peptide
KWKKLLKIPPPKFKKVALKF

SEQ ID NO: 1616 - protein, 20 aa, Artificial
  Short Peptide
RWKKLLKIPPPKFKKVALKF

SEQ ID NO: 1617 - protein, 20 aa, Artificial
  Short Peptide
FWKKLLKIPPPKFKKVALKF

SEQ ID NO: 1618 - protein, 20 aa, Artificial
  Short Peptide
KKKLFKKIPPPKFKKVALKF

SEQ ID NO: 1619 - protein, 20 aa, Artificial
  Short Peptide
RKKLFKKIPPPKFKKVALKF

SEQ ID NO: 1620 - protein, 20 aa, Artificial
  Short Peptide
FKKLFKKIPPPKFKKVALKF

SEQ ID NO: 1621 - protein, 20 aa, Artificial
  Short Peptide
KWKLFKKIPPPKFKKVALKF

SEQ ID NO: 1622 - protein, 20 aa, Artificial
  Short Peptide
RWKLFKKIPPPKFKKVALKF

SEQ ID NO: 1623 - protein, 20 aa, Artificial
  Short Peptide
FWKLFKKIPPPKFKKVALKF

SEQ ID NO: 1624 - protein, 20 aa, Artificial
  Short Peptide
KKKKFKKIPPPKFKKVALKF

SEQ ID NO: 1625 - protein, 20 aa, Artificial
  Short Peptide
RKKKFKKIPPPKFKKVALKF

SEQ ID NO: 1626 - protein, 20 aa, Artificial
  Short Peptide
FKKKFKKIPPPKFKKVALKF

SEQ ID NO: 1627 - protein, 20 aa, Artificial
  Short Peptide
KWKKFKKIPPPKFKKVALKF

SEQ ID NO: 1628 - protein, 20 aa, Artificial
  Short Peptide
RWKKFKKIPPPKFKKVALKF

SEQ ID NO: 1629 - protein, 20 aa, Artificial
  Short Peptide
FWKKFKKIPPPKFKKVALKF

SEQ ID NO: 1630 - protein, 20 aa, Artificial
  Short Peptide
KKKLLKKIPPPKFKKVALKF

SEQ ID NO: 1631 - protein, 20 aa, Artificial
  Short Peptide
RKKLLKKIPPPKFKKVALKF

SEQ ID NO: 1632 - protein, 20 aa, Artificial
  Short Peptide
FKKLLKKIPPPKFKKVALKF

SEQ ID NO: 1633 - protein, 20 aa, Artificial
  Short Peptide
KWKLLKKIPPPKFKKVALKF

SEQ ID NO: 1634 - protein, 20 aa, Artificial
  Short Peptide
RWKLLKKIPPPKFKKVALKF

SEQ ID NO: 1635 - protein, 20 aa, Artificial
  Short Peptide
FWKLLKKIPPPKFKKVALKF

SEQ ID NO: 1636 - protein, 20 aa, Artificial
  Short Peptide
KKKKLKKIPPPKFKKVALKF

SEQ ID NO: 1637 - protein, 20 aa, Artificial
  Short Peptide
RKKKLKKIPPPKFKKVALKF

SEQ ID NO: 1638 - protein, 20 aa, Artificial
  Short Peptide
FKKKLKKIPPPKFKKVALKF

SEQ ID NO: 1639 - protein, 20 aa, Artificial
  Short Peptide
KWKKLKKIPPPKFKKVALKF

SEQ ID NO: 1640 - protein, 20 aa, Artificial
  Short Peptide
RWKKLKKIPPPKFKKVALKF

SEQ ID NO: 1641 - protein, 20 aa, Artificial
  Short Peptide
FWKKLKKIPPPKFKKVALKF

SEQ ID NO: 1642 - protein, 19 aa, Artificial
  Short Peptide
KKKLFLKIPPKFKKVALKF

SEQ ID NO: 1643 - protein, 19 aa, Artificial
  Short Peptide
RKKLFLKIPPKFKKVALKF

SEQ ID NO: 1644 - protein, 19 aa, Artificial
  Short Peptide
FKKLFLKIPPKFKKVALKF

SEQ ID NO: 1645 - protein, 19 aa, Artificial
  Short Peptide
KWKLFLKIPPKFKKVALKF

SEQ ID NO: 1646 - protein, 19 aa, Artificial
  Short Peptide
RWKLFLKIPPKFKKVALKF

SEQ ID NO: 1647 - protein, 19 aa, Artificial
  Short Peptide
FWKLFLKIPPKFKKVALKF

SEQ ID NO: 1648 - protein, 19 aa, Artificial
  Short Peptide
KKKKFLKIPPKFKKVALKF

SEQ ID NO: 1649 - protein, 19 aa, Artificial
  Short Peptide
RKKKFLKIPPKFKKVALKF

SEQ ID NO: 1650 - protein, 19 aa, Artificial
  Short Peptide
FKKKFLKIPPKFKKVALKF

SEQ ID NO: 1651 - protein, 19 aa, Artificial
  Short Peptide
KWKKFLKIPPKFKKVALKF

SEQ ID NO: 1652 - protein, 19 aa, Artificial
  Short Peptide
RWKKFLKIPPKFKKVALKF

SEQ ID NO: 1653 - protein, 19 aa, Artificial
  Short Peptide
FWKKFLKIPPKFKKVALKF

SEQ ID NO: 1654 - protein, 19 aa, Artificial
  Short Peptide
KKKLLLKIPPKFKKVALKF

SEQ ID NO: 1655 - protein, 19 aa, Artificial
  Short Peptide
RKKLLLKIPPKFKKVALKF

SEQ ID NO: 1656 - protein, 19 aa, Artificial
  Short Peptide
FKKLLLKIPPKFKKVALKF

SEQ ID NO: 1657 - protein, 19 aa, Artificial
  Short Peptide
KWKLLLKIPPKFKKVALKF

SEQ ID NO: 1658 - protein, 19 aa, Artificial
  Short Peptide
RWKLLLKIPPKFKKVALKF

SEQ ID NO: 1659 - protein, 19 aa, Artificial
  Short Peptide
FWKLLLKIPPKFKKVALKF

SEQ ID NO: 1660 - protein, 19 aa, Artificial
  Short Peptide
KKKKLLKIPPKFKKVALKF

SEQ ID NO: 1661 - protein, 19 aa, Artificial
  Short Peptide
RKKKLLKIPPKFKKVALKF

SEQ ID NO: 1662 - protein, 19 aa, Artificial
  Short Peptide
FKKKLLKIPPKFKKVALKF

SEQ ID NO: 1663 - protein, 19 aa, Artificial
  Short Peptide
KWKKLLKIPPKFKKVALKF

SEQ ID NO: 1664 - protein, 19 aa, Artificial
  Short Peptide
RWKKLLKIPPKFKKVALKF

SEQ ID NO: 1665 - protein, 19 aa, Artificial
  Short Peptide
FWKKLLKIPPKFKKVALKF

SEQ ID NO: 1666 - protein, 19 aa, Artificial
  Short Peptide
KKKLFKKIPPKFKKVALKF

SEQ ID NO: 1667 - protein, 19 aa, Artificial
  Short Peptide
RKKLFKKIPPKFKKVALKF

SEQ ID NO: 1668 - protein, 19 aa, Artificial
  Short Peptide
FKKLFKKIPPKFKKVALKF

SEQ ID NO: 1669 - protein, 19 aa, Artificial
  Short Peptide
KWKLFKKIPPKFKKVALKF

SEQ ID NO: 1670 - protein, 19 aa, Artificial
  Short Peptide
RWKLFKKIPPKFKKVALKF

SEQ ID NO: 1671 - protein, 19 aa, Artificial
  Short Peptide
FWKLFKKIPPKFKKVALKF

SEQ ID NO: 1672 - protein, 19 aa, Artificial
  Short Peptide
KKKKFKKIPPKFKKVALKF

SEQ ID NO: 1673 - protein, 19 aa, Artificial
  Short Peptide
RKKKFKKIPPKFKKVALKF

SEQ ID NO: 1674 - protein, 19 aa, Artificial
  Short Peptide
FKKKFKKIPPKFKKVALKF

SEQ ID NO: 1675 - protein, 19 aa, Artificial
  Short Peptide
KWKKFKKIPPKFKKVALKF

SEQ ID NO: 1676 - protein, 19 aa, Artificial
  Short Peptide
RWKKFKKIPPKFKKVALKF

SEQ ID NO: 1677 - protein, 19 aa, Artificial
  Short Peptide
FWKKFKKIPPKFKKVALKF

SEQ ID NO: 1678 - protein, 19 aa, Artificial
  Short Peptide
KKKLLKKIPPKFKKVALKF

SEQ ID NO: 1679 - protein, 19 aa, Artificial
  Short Peptide
RKKLLKKIPPKFKKVALKF

SEQ ID NO: 1680 - protein, 19 aa, Artificial
  Short Peptide
FKKLLKKIPPKFKKVALKF

SEQ ID NO: 1681 - protein, 19 aa, Artificial
  Short Peptide
KWKLLKKIPPKFKKVALKF

SEQ ID NO: 1682 - protein, 19 aa, Artificial
  Short Peptide
RWKLLKKIPPKFKKVALKF

SEQ ID NO: 1683 - protein, 19 aa, Artificial
  Short Peptide
FWKLLKKIPPKFKKVALKF

SEQ ID NO: 1684 - protein, 19 aa, Artificial
  Short Peptide
KKKKLKKIPPKFKKVALKF

SEQ ID NO: 1685 - protein, 19 aa, Artificial
  Short Peptide
RKKKLKKIPPKFKKVALKF

SEQ ID NO: 1686 - protein, 19 aa, Artificial
  Short Peptide
FKKKLKKIPPKFKKVALKF

SEQ ID NO: 1687 - protein, 19 aa, Artificial
  Short Peptide
KWKKLKKIPPKFKKVALKF

SEQ ID NO: 1688 - protein, 19 aa, Artificial
  Short Peptide
RWKKLKKIPPKFKKVALKF

SEQ ID NO: 1689 - protein, 19 aa, Artificial
  Short Peptide
FWKKLKKIPPKFKKVALKF

SEQ ID NO: 1690 - protein, 18 aa, Artificial
  Short Peptide
KKKLFLKIPKFKKVALKF

SEQ ID NO: 1691 - protein, 18 aa, Artificial
  Short Peptide
RKKLFLKIPKFKKVALKF

SEQ ID NO: 1692 - protein, 18 aa, Artificial
  Short Peptide
FKKLFLKIPKFKKVALKF

SEQ ID NO: 1693 - protein, 18 aa, Artificial
  Short Peptide
KWKLFLKIPKFKKVALKF

SEQ ID NO: 1694 - protein, 18 aa, Artificial
  Short Peptide
RWKLFLKIPKFKKVALKF

SEQ ID NO: 1695 - protein, 18 aa, Artificial
  Short Peptide
FWKLFLKIPKFKKVALKF

SEQ ID NO: 1696 - protein, 18 aa, Artificial
  Short Peptide
KKKKFLKIPKFKKVALKF

SEQ ID NO: 1697 - protein, 18 aa, Artificial
  Short Peptide
RKKKFLKIPKFKKVALKF

SEQ ID NO: 1698 - protein, 18 aa, Artificial
  Short Peptide
FKKKFLKIPKFKKVALKF

SEQ ID NO: 1699 - protein, 18 aa, Artificial
  Short Peptide
KWKKFLKIPKFKKVALKF

SEQ ID NO: 1700 - protein, 18 aa, Artificial
  Short Peptide
RWKKFLKIPKFKKVALKF

SEQ ID NO: 1701 - protein, 18 aa, Artificial
  Short Peptide
FWKKFLKIPKFKKVALKF

SEQ ID NO: 1702 - protein, 18 aa, Artificial
  Short Peptide
KKKLLLKIPKFKKVALKF

SEQ ID NO: 1703 - protein, 18 aa, Artificial
  Short Peptide
RKKLLLKIPKFKKVALKF

SEQ ID NO: 1704 - protein, 18 aa, Artificial
  Short Peptide
FKKLLLKIPKFKKVALKF

SEQ ID NO: 1705 - protein, 18 aa, Artificial
  Short Peptide
KWKLLLKIPKFKKVALKF

SEQ ID NO: 1706 - protein, 18 aa, Artificial
  Short Peptide
RWKLLLKIPKFKKVALKF

SEQ ID NO: 1707 - protein, 18 aa, Artificial
  Short Peptide
FWKLLLKIPKFKKVALKF

SEQ ID NO: 1708 - protein, 18 aa, Artificial
  Short Peptide
KKKKLLKIPKFKKVALKF

SEQ ID NO: 1709 - protein, 18 aa, Artificial
  Short Peptide
RKKKLLKIPKFKKVALKF

SEQ ID NO: 1710 - protein, 18 aa, Artificial
  Short Peptide
FKKKLLKIPKFKKVALKF

SEQ ID NO: 1711 - protein, 18 aa, Artificial
  Short Peptide
KWKKLLKIPKFKKVALKF

SEQ ID NO: 1712 - protein, 18 aa, Artificial
  Short Peptide
RWKKLLKIPKFKKVALKF

SEQ ID NO: 1713 - protein, 18 aa, Artificial
  Short Peptide
FWKKLLKIPKFKKVALKF

SEQ ID NO: 1714 - protein, 18 aa, Artificial
  Short Peptide
KKKLFKKIPKFKKVALKF

SEQ ID NO: 1715 - protein, 18 aa, Artificial
  Short Peptide
RKKLFKKIPKFKKVALKF

SEQ ID NO: 1716 - protein, 18 aa, Artificial
  Short Peptide
FKKLFKKIPKFKKVALKF

SEQ ID NO: 1717 - protein, 18 aa, Artificial
  Short Peptide
KWKLFKKIPKFKKVALKF

SEQ ID NO: 1718 - protein, 18 aa, Artificial
  Short Peptide
RWKLFKKIPKFKKVALKF

SEQ ID NO: 1719 - protein, 18 aa, Artificial
  Short Peptide
FWKLFKKIPKFKKVALKF

SEQ ID NO: 1720 - protein, 18 aa, Artificial
  Short Peptide
KKKKFKKIPKFKKVALKF

SEQ ID NO: 1721 - protein, 18 aa, Artificial
  Short Peptide
RKKKFKKIPKFKKVALKF

SEQ ID NO: 1722 - protein, 18 aa, Artificial
  Short Peptide
FKKKFKKIPKFKKVALKF

SEQ ID NO: 1723 - protein, 18 aa, Artificial
  Short Peptide
KWKKFKKIPKFKKVALKF

SEQ ID NO: 1724 - protein, 18 aa, Artificial
  Short Peptide
RWKKFKKIPKFKKVALKF

SEQ ID NO: 1725 - protein, 18 aa, Artificial
  Short Peptide
FWKKFKKIPKFKKVALKF

SEQ ID NO: 1726 - protein, 18 aa, Artificial
  Short Peptide
KKKLLKKIPKFKKVALKF

SEQ ID NO: 1727 - protein, 18 aa, Artificial
  Short Peptide
RKKLLKKIPKFKKVALKF

SEQ ID NO: 1728 - protein, 18 aa, Artificial
  Short Peptide
FKKLLKKIPKFKKVALKF

SEQ ID NO: 1729 - protein, 18 aa, Artificial
  Short Peptide
KWKLLKKIPKFKKVALKF

SEQ ID NO: 1730 - protein, 18 aa, Artificial
  Short Peptide
RWKLLKKIPKFKKVALKF

SEQ ID NO: 1731 - protein, 18 aa, Artificial
  Short Peptide
FWKLLKKIPKFKKVALKF

SEQ ID NO: 1732 - protein, 18 aa, Artificial
  Short Peptide
KKKKLKKIPKFKKVALKF

SEQ ID NO: 1733 - protein, 18 aa, Artificial
  Short Peptide
RKKKLKKIPKFKKVALKF

SEQ ID NO: 1734 - protein, 18 aa, Artificial
  Short Peptide
FKKKLKKIPKFKKVALKF

SEQ ID NO: 1735 - protein, 18 aa, Artificial
  Short Peptide
KWKKLKKIPKFKKVALKF

SEQ ID NO: 1736 - protein, 18 aa, Artificial
  Short Peptide
RWKKLKKIPKFKKVALKF

SEQ ID NO: 1737 - protein, 18 aa, Artificial
  Short Peptide
FWKKLKKIPKFKKVALKF

SEQ ID NO: 1738 - protein, 20 aa, Artificial
  Short Peptide
KKKLFLKIPPPKFLHSALKF

SEQ ID NO: 1739 - protein, 20 aa, Artificial
  Short Peptide
RKKLFLKIPPPKFLHSALKF

SEQ ID NO: 1740 - protein, 20 aa, Artificial
  Short Peptide
FKKLFLKIPPPKFLHSALKF

SEQ ID NO: 1741 - protein, 20 aa, Artificial
  Short Peptide
KWKLFLKIPPPKFLHSALKF

SEQ ID NO: 1742 - protein, 20 aa, Artificial
  Short Peptide
RWKLFLKIPPPKFLHSALKF

SEQ ID NO: 1743 - protein, 20 aa, Artificial
  Short Peptide
FWKLFLKIPPPKFLHSALKF

SEQ ID NO: 1744 - protein, 20 aa, Artificial
  Short Peptide
KKKKFLKIPPPKFLHSALKF

SEQ ID NO: 1745 - protein, 20 aa, Artificial
  Short Peptide
RKKKFLKIPPPKFLHSALKF

SEQ ID NO: 1746 - protein, 20 aa, Artificial
  Short Peptide
FKKKFLKIPPPKFLHSALKF

SEQ ID NO: 1747 - protein, 20 aa, Artificial
  Short Peptide
KWKKFLKIPPPKFLHSALKF

SEQ ID NO: 1748 - protein, 20 aa, Artificial
  Short Peptide
RWKKFLKIPPPKFLHSALKF

SEQ ID NO: 1749 - protein, 20 aa, Artificial
  Short Peptide
FWKKFLKIPPPKFLHSALKF

SEQ ID NO: 1750 - protein, 20 aa, Artificial
  Short Peptide
KKKLLLKIPPPKFLHSALKF

SEQ ID NO: 1751 - protein, 20 aa, Artificial
  Short Peptide
RKKLLLKIPPPKFLHSALKF

SEQ ID NO: 1752 - protein, 20 aa, Artificial
  Short Peptide
FKKLLLKIPPPKFLHSALKF

SEQ ID NO: 1753 - protein, 20 aa, Artificial
  Short Peptide
KWKLLLKIPPPKFLHSALKF

SEQ ID NO: 1754 - protein, 20 aa, Artificial
  Short Peptide
RWKLLLKIPPPKFLHSALKF

SEQ ID NO: 1755 - protein, 20 aa, Artificial
  Short Peptide
FWKLLLKIPPPKFLHSALKF

SEQ ID NO: 1756 - protein, 20 aa, Artificial
  Short Peptide
KKKKLLKIPPPKFLHSALKF

SEQ ID NO: 1757 - protein, 20 aa, Artificial
  Short Peptide
RKKKLLKIPPPKFLHSALKF

SEQ ID NO: 1758 - protein, 20 aa, Artificial
  Short Peptide
FKKKLLKIPPPKFLHSALKF

SEQ ID NO: 1759 - protein, 20 aa, Artificial
  Short Peptide
KWKKLLKIPPPKFLHSALKF

SEQ ID NO: 1760 - protein, 20 aa, Artificial
  Short Peptide
RWKKLLKIPPPKFLHSALKF

SEQ ID NO: 1761 - protein, 20 aa, Artificial
  Short Peptide
FWKKLLKIPPPKFLHSALKF

SEQ ID NO: 1762 - protein, 20 aa, Artificial
  Short Peptide
KKKLFKKIPPPKFLHSALKF

SEQ ID NO: 1763 - protein, 20 aa, Artificial
  Short Peptide
RKKLFKKIPPPKFLHSALKF

SEQ ID NO: 1764 - protein, 20 aa, Artificial
  Short Peptide
FKKLFKKIPPPKFLHSALKF

SEQ ID NO: 1765 - protein, 20 aa, Artificial
  Short Peptide
KWKLFKKIPPPKFLHSALKF

SEQ ID NO: 1766 - protein, 20 aa, Artificial
  Short Peptide
RWKLFKKIPPPKFLHSALKF

SEQ ID NO: 1767 - protein, 20 aa, Artificial
  Short Peptide
FWKLFKKIPPPKFLHSALKF

SEQ ID NO: 1768 - protein, 20 aa, Artificial
  Short Peptide
KKKKFKKIPPPKFLHSALKF

SEQ ID NO: 1769 - protein, 20 aa, Artificial
  Short Peptide
RKKKFKKIPPPKFLHSALKF

SEQ ID NO: 1770 - protein, 20 aa, Artificial
  Short Peptide
FKKKFKKIPPPKFLHSALKF

SEQ ID NO: 1771 - protein, 20 aa, Artificial
  Short Peptide
KWKKFKKIPPPKFLHSALKF

SEQ ID NO: 1772 - protein, 20 aa, Artificial
  Short Peptide
RWKKFKKIPPPKFLHSALKF

SEQ ID NO: 1773 - protein, 20 aa, Artificial
  Short Peptide
FWKKFKKIPPPKFLHSALKF

SEQ ID NO: 1774 - protein, 20 aa, Artificial
  Short Peptide
KKKLLKKIPPPKFLHSALKF

SEQ ID NO: 1775 - protein, 20 aa, Artificial
  Short Peptide
RKKLLKKIPPPKFLHSALKF

SEQ ID NO: 1776 - protein, 20 aa, Artificial
  Short Peptide
FKKLLKKIPPPKFLHSALKF

SEQ ID NO: 1777 - protein, 20 aa, Artificial
  Short Peptide
KWKLLKKIPPPKFLHSALKF

SEQ ID NO: 1778 - protein, 20 aa, Artificial
  Short Peptide
RWKLLKKIPPPKFLHSALKF

SEQ ID NO: 1779 - protein, 20 aa, Artificial
  Short Peptide
FWKLLKKIPPPKFLHSALKF

SEQ ID NO: 1780 - protein, 20 aa, Artificial
  Short Peptide
KKKKLKKIPPPKFLHSALKF

SEQ ID NO: 1781 - protein, 20 aa, Artificial
  Short Peptide
RKKKLKKIPPPKFLHSALKF

SEQ ID NO: 1782 - protein, 20 aa, Artificial
  Short Peptide
FKKKLKKIPPPKFLHSALKF

SEQ ID NO: 1783 - protein, 20 aa, Artificial
  Short Peptide
KWKKLKKIPPPKFLHSALKF

SEQ ID NO: 1784 - protein, 20 aa, Artificial
  Short Peptide
RWKKLKKIPPPKFLHSALKF

SEQ ID NO: 1785 - protein, 20 aa, Artificial
  Short Peptide
FWKKLKKIPPPKFLHSALKF

SEQ ID NO: 1786 - protein, 19 aa, Artificial
  Short Peptide
KKKLFLKIPPKFLHSALKF

SEQ ID NO: 1787 - protein, 19 aa, Artificial
  Short Peptide
RKKLFLKIPPKFLHSALKF

SEQ ID NO: 1788 - protein, 19 aa, Artificial
  Short Peptide
FKKLFLKIPPKFLHSALKF

SEQ ID NO: 1789 - protein, 19 aa, Artificial
  Short Peptide
KWKLFLKIPPKFLHSALKF

SEQ ID NO: 1790 - protein, 19 aa, Artificial
  Short Peptide
RWKLFLKIPPKFLHSALKF

SEQ ID NO: 1791 - protein, 19 aa, Artificial
  Short Peptide
FWKLFLKIPPKFLHSALKF

SEQ ID NO: 1792 - protein, 19 aa, Artificial
  Short Peptide
KKKKFLKIPPKFLHSALKF

SEQ ID NO: 1793 - protein, 19 aa, Artificial
  Short Peptide
RKKKFLKIPPKFLHSALKF

SEQ ID NO: 1794 - protein, 19 aa, Artificial
  Short Peptide
FKKKFLKIPPKFLHSALKF

SEQ ID NO: 1795 - protein, 19 aa, Artificial
  Short Peptide
KWKKFLKIPPKFLHSALKF

SEQ ID NO: 1796 - protein, 19 aa, Artificial
  Short Peptide
RWKKFLKIPPKFLHSALKF

SEQ ID NO: 1797 - protein, 19 aa, Artificial
  Short Peptide
FWKKFLKIPPKFLHSALKF

SEQ ID NO: 1798 - protein, 19 aa, Artificial
  Short Peptide
KKKLLLKIPPKFLHSALKF

SEQ ID NO: 1799 - protein, 19 aa, Artificial
  Short Peptide
RKKLLLKIPPKFLHSALKF

SEQ ID NO: 1800 - protein, 19 aa, Artificial
  Short Peptide
FKKLLLKIPPKFLHSALKF

SEQ ID NO: 1801 - protein, 19 aa, Artificial
  Short Peptide
KWKLLLKIPPKFLHSALKF

SEQ ID NO: 1802 - protein, 19 aa, Artificial
  Short Peptide
RWKLLLKIPPKFLHSALKF

SEQ ID NO: 1803 - protein, 19 aa, Artificial
  Short Peptide
FWKLLLKIPPKFLHSALKF

SEQ ID NO: 1804 - protein, 19 aa, Artificial
  Short Peptide
KKKKLLKIPPKFLHSALKF

SEQ ID NO: 1805 - protein, 19 aa, Artificial
  Short Peptide
RKKKLLKIPPKFLHSALKF

SEQ ID NO: 1806 - protein, 19 aa, Artificial
  Short Peptide
FKKKLLKIPPKFLHSALKF

SEQ ID NO: 1807 - protein, 19 aa, Artificial
  Short Peptide
KWKKLLKIPPKFLHSALKF

SEQ ID NO: 1808 - protein, 19 aa, Artificial
  Short Peptide
RWKKLLKIPPKFLHSALKF

SEQ ID NO: 1809 - protein, 19 aa, Artificial
  Short Peptide
FWKKLLKIPPKFLHSALKF

SEQ ID NO: 1810 - protein, 19 aa, Artificial
  Short Peptide
KKKLFKKIPPKFLHSALKF

SEQ ID NO: 1811 - protein, 19 aa, Artificial
  Short Peptide
RKKLFKKIPPKFLHSALKF

SEQ ID NO: 1812 - protein, 19 aa, Artificial
  Short Peptide
FKKLFKKIPPKFLHSALKF

SEQ ID NO: 1813 - protein, 19 aa, Artificial
  Short Peptide
KWKLFKKIPPKFLHSALKF

SEQ ID NO: 1814 - protein, 19 aa, Artificial
  Short Peptide
RWKLFKKIPPKFLHSALKF

SEQ ID NO: 1815 - protein, 19 aa, Artificial
  Short Peptide
FWKLFKKIPPKFLHSALKF

SEQ ID NO: 1816 - protein, 19 aa, Artificial
  Short Peptide
KKKKFKKIPPKFLHSALKF

SEQ ID NO: 1817 - protein, 19 aa, Artificial
  Short Peptide
RKKKFKKIPPKFLHSALKF

SEQ ID NO: 1818 - protein, 19 aa, Artificial
  Short Peptide
FKKKFKKIPPKFLHSALKF

SEQ ID NO: 1819 - protein, 19 aa, Artificial
  Short Peptide
KWKKFKKIPPKFLHSALKF

SEQ ID NO: 1820 - protein, 19 aa, Artificial
  Short Peptide
RWKKFKKIPPKFLHSALKF

SEQ ID NO: 1821 - protein, 19 aa, Artificial
  Short Peptide
FWKKFKKIPPKFLHSALKF

SEQ ID NO: 1822 - protein, 19 aa, Artificial
  Short Peptide
KKKLLKKIPPKFLHSALKF

SEQ ID NO: 1823 - protein, 19 aa, Artificial
  Short Peptide
RKKLLKKIPPKFLHSALKF

SEQ ID NO: 1824 - protein, 19 aa, Artificial
  Short Peptide
FKKLLKKIPPKFLHSALKF

SEQ ID NO: 1825 - protein, 19 aa, Artificial
  Short Peptide
KWKLLKKIPPKFLHSALKF

SEQ ID NO: 1826 - protein, 19 aa, Artificial
  Short Peptide
RWKLLKKIPPKFLHSALKF

SEQ ID NO: 1827 - protein, 19 aa, Artificial
  Short Peptide
FWKLLKKIPPKFLHSALKF

SEQ ID NO: 1828 - protein, 19 aa, Artificial
  Short Peptide
KKKKLKKIPPKFLHSALKF

SEQ ID NO: 1829 - protein, 19 aa, Artificial
  Short Peptide
RKKKLKKIPPKFLHSALKF

SEQ ID NO: 1830 - protein, 19 aa, Artificial
  Short Peptide
FKKKLKKIPPKFLHSALKF

SEQ ID NO: 1831 - protein, 19 aa, Artificial
  Short Peptide
KWKKLKKIPPKFLHSALKF

SEQ ID NO: 1832 - protein, 19 aa, Artificial
  Short Peptide
RWKKLKKIPPKFLHSALKF

SEQ ID NO: 1833 - protein, 19 aa, Artificial
  Short Peptide
FWKKLKKIPPKFLHSALKF

SEQ ID NO: 1834 - protein, 18 aa, Artificial
  Short Peptide
KKKLFLKIPKFLHSALKF

SEQ ID NO: 1835 - protein, 18 aa, Artificial
  Short Peptide
RKKLFLKIPKFLHSALKF

SEQ ID NO: 1836 - protein, 18 aa, Artificial
  Short Peptide
FKKLFLKIPKFLHSALKF

SEQ ID NO: 1837 - protein, 18 aa, Artificial
  Short Peptide
KWKLFLKIPKFLHSALKF

SEQ ID NO: 1838 - protein, 18 aa, Artificial
  Short Peptide
RWKLFLKIPKFLHSALKF

SEQ ID NO: 1839 - protein, 18 aa, Artificial
  Short Peptide
FWKLFLKIPKFLHSALKF

SEQ ID NO: 1840 - protein, 18 aa, Artificial
  Short Peptide
KKKKFLKIPKFLHSALKF

SEQ ID NO: 1841 - protein, 18 aa, Artificial
  Short Peptide
RKKKFLKIPKFLHSALKF

SEQ ID NO: 1842 - protein, 18 aa, Artificial
  Short Peptide
FKKKFLKIPKFLHSALKF

SEQ ID NO: 1843 - protein, 18 aa, Artificial
  Short Peptide
KWKKFLKIPKFLHSALKF

SEQ ID NO: 1844 - protein, 18 aa, Artificial
  Short Peptide
RWKKFLKIPKFLHSALKF

SEQ ID NO: 1845 - protein, 18 aa, Artificial
  Short Peptide
FWKKFLKIPKFLHSALKF

SEQ ID NO: 1846 - protein, 18 aa, Artificial
  Short Peptide
KKKLLLKIPKFLHSALKF

SEQ ID NO: 1847 - protein, 18 aa, Artificial
  Short Peptide
RKKLLLKIPKFLHSALKF

SEQ ID NO: 1848 - protein, 18 aa, Artificial
  Short Peptide
FKKLLLKIPKFLHSALKF

SEQ ID NO: 1849 - protein, 18 aa, Artificial
  Short Peptide
KWKLLLKIPKFLHSALKF

SEQ ID NO: 1850 - protein, 18 aa, Artificial
  Short Peptide
RWKLLLKIPKFLHSALKF

SEQ ID NO: 1851 - protein, 18 aa, Artificial
  Short Peptide
FWKLLLKIPKFLHSALKF

SEQ ID NO: 1852 - protein, 18 aa, Artificial
  Short Peptide
KKKKLLKIPKFLHSALKF

SEQ ID NO: 1853 - protein, 18 aa, Artificial
  Short Peptide
RKKKLLKIPKFLHSALKF

SEQ ID NO: 1854 - protein, 18 aa, Artificial
  Short Peptide
FKKKLLKIPKFLHSALKF

SEQ ID NO: 1855 - protein, 18 aa, Artificial
  Short Peptide
KWKKLLKIPKFLHSALKF

SEQ ID NO: 1856 - protein, 18 aa, Artificial
  Short Peptide
RWKKLLKIPKFLHSALKF

SEQ ID NO: 1857 - protein, 18 aa, Artificial
  Short Peptide
FWKKLLKIPKFLHSALKF

SEQ ID NO: 1858 - protein, 18 aa, Artificial
  Short Peptide
KKKLFKKIPKFLHSALKF

SEQ ID NO: 1859 - protein, 18 aa, Artificial
  Short Peptide
RKKLFKKIPKFLHSALKF

SEQ ID NO: 1860 - protein, 18 aa, Artificial
  Short Peptide
FKKLFKKIPKFLHSALKF

SEQ ID NO: 1861 - protein, 18 aa, Artificial
  Short Peptide
KWKLFKKIPKFLHSALKF

SEQ ID NO: 1862 - protein, 18 aa, Artificial
  Short Peptide
RWKLFKKIPKFLHSALKF

SEQ ID NO: 1863 - protein, 18 aa, Artificial
  Short Peptide
FWKLFKKIPKFLHSALKF

SEQ ID NO: 1864 - protein, 18 aa, Artificial
  Short Peptide
KKKKFKKIPKFLHSALKF

SEQ ID NO: 1865 - protein, 18 aa, Artificial
  Short Peptide
RKKKFKKIPKFLHSALKF

SEQ ID NO: 1866 - protein, 18 aa, Artificial
  Short Peptide
FKKKFKKIPKFLHSALKF

SEQ ID NO: 1867 - protein, 18 aa, Artificial
  Short Peptide
KWKKFKKIPKFLHSALKF

SEQ ID NO: 1868 - protein, 18 aa, Artificial
  Short Peptide
RWKKFKKIPKFLHSALKF

SEQ ID NO: 1869 - protein, 18 aa, Artificial
  Short Peptide
FWKKFKKIPKFLHSALKF

SEQ ID NO: 1870 - protein, 18 aa, Artificial
  Short Peptide
KKKLLKKIPKFLHSALKF

SEQ ID NO: 1871 - protein, 18 aa, Artificial
  Short Peptide
RKKLLKKIPKFLHSALKF

SEQ ID NO: 1872 - protein, 18 aa, Artificial
  Short Peptide
FKKLLKKIPKFLHSALKF

SEQ ID NO: 1873 - protein, 18 aa, Artificial
  Short Peptide
KWKLLKKIPKFLHSALKF

SEQ ID NO: 1874 - protein, 18 aa, Artificial
  Short Peptide
RWKLLKKIPKFLHSALKF

SEQ ID NO: 1875 - protein, 18 aa, Artificial
  Short Peptide
FWKLLKKIPKFLHSALKF

SEQ ID NO: 1876 - protein, 18 aa, Artificial
  Short Peptide
KKKKLKKIPKFLHSALKF

SEQ ID NO: 1877 - protein, 18 aa, Artificial
  Short Peptide
RKKKLKKIPKFLHSALKF

SEQ ID NO: 1878 - protein, 18 aa, Artificial
  Short Peptide
FKKKLKKIPKFLHSALKF

SEQ ID NO: 1879 - protein, 18 aa, Artificial
  Short Peptide
KWKKLKKIPKFLHSALKF

SEQ ID NO: 1880 - protein, 18 aa, Artificial
  Short Peptide
RWKKLKKIPKFLHSALKF

SEQ ID NO: 1881 - protein, 18 aa, Artificial
  Short Peptide
FWKKLKKIPKFLHSALKF

SEQ ID NO: 1882 - protein, 20 aa, Artificial
  Short Peptide
KKKLFLKIPPPKFKHSALKF

SEQ ID NO: 1883 - protein, 20 aa, Artificial
  Short Peptide
RKKLFLKIPPPKFKHSALKF

SEQ ID NO: 1884 - protein, 20 aa, Artificial
  Short Peptide
FKKLFLKIPPPKFKHSALKF

SEQ ID NO: 1885 - protein, 20 aa, Artificial
  Short Peptide
KWKLFLKIPPPKFKHSALKF

SEQ ID NO: 1886 - protein, 20 aa, Artificial
  Short Peptide
RWKLFLKIPPPKFKHSALKF

SEQ ID NO: 1887 - protein, 20 aa, Artificial
  Short Peptide
FWKLFLKIPPPKFKHSALKF

SEQ ID NO: 1888 - protein, 20 aa, Artificial
  Short Peptide
KKKKFLKIPPPKFKHSALKF

SEQ ID NO: 1889 - protein, 20 aa, Artificial
  Short Peptide
RKKKFLKIPPPKFKHSALKF

SEQ ID NO: 1890 - protein, 20 aa, Artificial
  Short Peptide
FKKKFLKIPPPKFKHSALKF

SEQ ID NO: 1891 - protein, 20 aa, Artificial
  Short Peptide
KWKKFLKIPPPKFKHSALKF

SEQ ID NO: 1892 - protein, 20 aa, Artificial
  Short Peptide
RWKKFLKIPPPKFKHSALKF

SEQ ID NO: 1893 - protein, 20 aa, Artificial
  Short Peptide
FWKKFLKIPPPKFKHSALKF

SEQ ID NO: 1894 - protein, 20 aa, Artificial
  Short Peptide
KKKLLLKIPPPKFKHSALKF

SEQ ID NO: 1895 - protein, 20 aa, Artificial
  Short Peptide
RKKLLLKIPPPKFKHSALKF

SEQ ID NO: 1896 - protein, 20 aa, Artificial
  Short Peptide
FKKLLLKIPPPKFKHSALKF

SEQ ID NO: 1897 - protein, 20 aa, Artificial
  Short Peptide
KWKLLLKIPPPKFKHSALKF

SEQ ID NO: 1898 - protein, 20 aa, Artificial
  Short Peptide
RWKLLLKIPPPKFKHSALKF

SEQ ID NO: 1899 - protein, 20 aa, Artificial
  Short Peptide
FWKLLLKIPPPKFKHSALKF

SEQ ID NO: 1900 - protein, 20 aa, Artificial
  Short Peptide
KKKKLLKIPPPKFKHSALKF

SEQ ID NO: 1901 - protein, 20 aa, Artificial
  Short Peptide
RKKKLLKIPPPKFKHSALKF

SEQ ID NO: 1902 - protein, 20 aa, Artificial
  Short Peptide
FKKKLLKIPPPKFKHSALKF

SEQ ID NO: 1903 - protein, 20 aa, Artificial
  Short Peptide
KWKKLLKIPPPKFKHSALKF

SEQ ID NO: 1904 - protein, 20 aa, Artificial
  Short Peptide
RWKKLLKIPPPKFKHSALKF

SEQ ID NO: 1905 - protein, 20 aa, Artificial
  Short Peptide
FWKKLLKIPPPKFKHSALKF

SEQ ID NO: 1906 - protein, 20 aa, Artificial
  Short Peptide
KKKLFKKIPPPKFKHSALKF

SEQ ID NO: 1907 - protein, 20 aa, Artificial
  Short Peptide
RKKLFKKIPPPKFKHSALKF

SEQ ID NO: 1908 - protein, 20 aa, Artificial
  Short Peptide
FKKLFKKIPPPKFKHSALKF

SEQ ID NO: 1909 - protein, 20 aa, Artificial
  Short Peptide
KWKLFKKIPPPKFKHSALKF

SEQ ID NO: 1910 - protein, 20 aa, Artificial
  Short Peptide
RWKLFKKIPPPKFKHSALKF

SEQ ID NO: 1911 - protein, 20 aa, Artificial
  Short Peptide
FWKLFKKIPPPKFKHSALKF

SEQ ID NO: 1912 - protein, 20 aa, Artificial
  Short Peptide
KKKKFKKIPPPKFKHSALKF

SEQ ID NO: 1913 - protein, 20 aa, Artificial
  Short Peptide
RKKKFKKIPPPKFKHSALKF

SEQ ID NO: 1914 - protein, 20 aa, Artificial
  Short Peptide
FKKKFKKIPPPKFKHSALKF

SEQ ID NO: 1915 - protein, 20 aa, Artificial
  Short Peptide
KWKKFKKIPPPKFKHSALKF

SEQ ID NO: 1916 - protein, 20 aa, Artificial
  Short Peptide
RWKKFKKIPPPKFKHSALKF

SEQ ID NO: 1917 - protein, 20 aa, Artificial
  Short Peptide
FWKKFKKIPPPKFKHSALKF

SEQ ID NO: 1918 - protein, 20 aa, Artificial
  Short Peptide
KKKLLKKIPPPKFKHSALKF

SEQ ID NO: 1919 - protein, 20 aa, Artificial
  Short Peptide
RKKLLKKIPPPKFKHSALKF

SEQ ID NO: 1920 - protein, 20 aa, Artificial
  Short Peptide
FKKLLKKIPPPKFKHSALKF

SEQ ID NO: 1921 - protein, 20 aa, Artificial
  Short Peptide
KWKLLKKIPPPKFKHSALKF

SEQ ID NO: 1922 - protein, 20 aa, Artificial
  Short Peptide
RWKLLKKIPPPKFKHSALKF

SEQ ID NO: 1923 - protein, 20 aa, Artificial
  Short Peptide
FWKLLKKIPPPKFKHSALKF

SEQ ID NO: 1924 - protein, 20 aa, Artificial
  Short Peptide
KKKKLKKIPPPKFKHSALKF

SEQ ID NO: 1925 - protein, 20 aa, Artificial
  Short Peptide
RKKKLKKIPPPKFKHSALKF

SEQ ID NO: 1926 - protein, 20 aa, Artificial
  Short Peptide
FKKKLKKIPPPKFKHSALKF

SEQ ID NO: 1927 - protein, 20 aa, Artificial
  Short Peptide
KWKKLKKIPPPKFKHSALKF

SEQ ID NO: 1928 - protein, 20 aa, Artificial
  Short Peptide
RWKKLKKIPPPKFKHSALKF

SEQ ID NO: 1929 - protein, 20 aa, Artificial
  Short Peptide
FWKKLKKIPPPKFKHSALKF

SEQ ID NO: 1930 - protein, 19 aa, Artificial
  Short Peptide
KKKLFLKIPPKFKHSALKF

SEQ ID NO: 1931 - protein, 19 aa, Artificial
  Short Peptide
RKKLFLKIPPKFKHSALKF

SEQ ID NO: 1932 - protein, 19 aa, Artificial
  Short Peptide
FKKLFLKIPPKFKHSALKF

SEQ ID NO: 1933 - protein, 19 aa, Artificial
  Short Peptide
KWKLFLKIPPKFKHSALKF

SEQ ID NO: 1934 - protein, 19 aa, Artificial
  Short Peptide
RWKLFLKIPPKFKHSALKF

SEQ ID NO: 1935 - protein, 19 aa, Artificial
  Short Peptide
FWKLFLKIPPKFKHSALKF

SEQ ID NO: 1936 - protein, 19 aa, Artificial
  Short Peptide
KKKKFLKIPPKFKHSALKF

SEQ ID NO: 1937 - protein, 19 aa, Artificial
  Short Peptide
RKKKFLKIPPKFKHSALKF

SEQ ID NO: 1938 - protein, 19 aa, Artificial
  Short Peptide
FKKKFLKIPPKFKHSALKF

SEQ ID NO: 1939 - protein, 19 aa, Artificial
  Short Peptide
KWKKFLKIPPKFKHSALKF

SEQ ID NO: 1940 - protein, 19 aa, Artificial
  Short Peptide
RWKKFLKIPPKFKHSALKF

SEQ ID NO: 1941 - protein, 19 aa, Artificial
  Short Peptide
FWKKFLKIPPKFKHSALKF

SEQ ID NO: 1942 - protein, 19 aa, Artificial
  Short Peptide
KKKLLLKIPPKFKHSALKF

SEQ ID NO: 1943 - protein, 19 aa, Artificial
  Short Peptide
RKKLLLKIPPKFKHSALKF

SEQ ID NO: 1944 - protein, 19 aa, Artificial
  Short Peptide
FKKLLLKIPPKFKHSALKF

SEQ ID NO: 1945 - protein, 19 aa, Artificial
  Short Peptide
KWKLLLKIPPKFKHSALKF

SEQ ID NO: 1946 - protein, 19 aa, Artificial
  Short Peptide
RWKLLLKIPPKFKHSALKF

SEQ ID NO: 1947 - protein, 19 aa, Artificial
  Short Peptide
FWKLLLKIPPKFKHSALKF

SEQ ID NO: 1948 - protein, 19 aa, Artificial
  Short Peptide
KKKKLLKIPPKFKHSALKF

SEQ ID NO: 1949 - protein, 19 aa, Artificial
  Short Peptide
RKKKLLKIPPKFKHSALKF

SEQ ID NO: 1950 - protein, 19 aa, Artificial
  Short Peptide
FKKKLLKIPPKFKHSALKF

SEQ ID NO: 1951 - protein, 19 aa, Artificial
  Short Peptide
KWKKLLKIPPKFKHSALKF

SEQ ID NO: 1952 - protein, 19 aa, Artificial
  Short Peptide
RWKKLLKIPPKFKHSALKF

SEQ ID NO: 1953 - protein, 19 aa, Artificial
  Short Peptide
FWKKLLKIPPKFKHSALKF

SEQ ID NO: 1954 - protein, 19 aa, Artificial
  Short Peptide
KKKLFKKIPPKFKHSALKF

SEQ ID NO: 1955 - protein, 19 aa, Artificial
  Short Peptide
RKKLFKKIPPKFKHSALKF

SEQ ID NO: 1956 - protein, 19 aa, Artificial
  Short Peptide
FKKLFKKIPPKFKHSALKF

SEQ ID NO: 1957 - protein, 19 aa, Artificial
  Short Peptide
KWKLFKKIPPKFKHSALKF

SEQ ID NO: 1958 - protein, 19 aa, Artificial
  Short Peptide
RWKLFKKIPPKFKHSALKF

SEQ ID NO: 1959 - protein, 19 aa, Artificial
  Short Peptide
FWKLFKKIPPKFKHSALKF

SEQ ID NO: 1960 - protein, 19 aa, Artificial
  Short Peptide
KKKKFKKIPPKFKHSALKF

SEQ ID NO: 1961 - protein, 19 aa, Artificial
  Short Peptide
RKKKFKKIPPKFKHSALKF

SEQ ID NO: 1962 - protein, 19 aa, Artificial
  Short Peptide
FKKKFKKIPPKFKHSALKF

SEQ ID NO: 1963 - protein, 19 aa, Artificial
  Short Peptide
KWKKFKKIPPKFKHSALKF

SEQ ID NO: 1964 - protein, 19 aa, Artificial
  Short Peptide
RWKKFKKIPPKFKHSALKF

SEQ ID NO: 1965 - protein, 19 aa, Artificial
  Short Peptide
FWKKFKKIPPKFKHSALKF

SEQ ID NO: 1966 - protein, 19 aa, Artificial
  Short Peptide
KKKLLKKIPPKFKHSALKF

SEQ ID NO: 1967 - protein, 19 aa, Artificial
  Short Peptide
RKKLLKKIPPKFKHSALKF

SEQ ID NO: 1968 - protein, 19 aa, Artificial
  Short Peptide
FKKLLKKIPPKFKHSALKF

SEQ ID NO: 1969 - protein, 19 aa, Artificial
  Short Peptide
KWKLLKKIPPKFKHSALKF

SEQ ID NO: 1970 - protein, 19 aa, Artificial
  Short Peptide
RWKLLKKIPPKFKHSALKF

SEQ ID NO: 1971 - protein, 19 aa, Artificial
  Short Peptide
FWKLLKKIPPKFKHSALKF

SEQ ID NO: 1972 - protein, 19 aa, Artificial
  Short Peptide
KKKKLKKIPPKFKHSALKF

SEQ ID NO: 1973 - protein, 19 aa, Artificial
  Short Peptide
RKKKLKKIPPKFKHSALKF

SEQ ID NO: 1974 - protein, 19 aa, Artificial
  Short Peptide
FKKKLKKIPPKFKHSALKF

SEQ ID NO: 1975 - protein, 19 aa, Artificial
  Short Peptide
KWKKLKKIPPKFKHSALKF

SEQ ID NO: 1976 - protein, 19 aa, Artificial
  Short Peptide
RWKKLKKIPPKFKHSALKF

SEQ ID NO: 1977 - protein, 19 aa, Artificial
  Short Peptide
FWKKLKKIPPKFKHSALKF

SEQ ID NO: 1978 - protein, 18 aa, Artificial
  Short Peptide
KKKLFLKIPKFKHSALKF

SEQ ID NO: 1979 - protein, 18 aa, Artificial
  Short Peptide
RKKLFLKIPKFKHSALKF

SEQ ID NO: 1980 - protein, 18 aa, Artificial
  Short Peptide
FKKLFLKIPKFKHSALKF

SEQ ID NO: 1981 - protein, 18 aa, Artificial
  Short Peptide
KWKLFLKIPKFKHSALKF

SEQ ID NO: 1982 - protein, 18 aa, Artificial
  Short Peptide
RWKLFLKIPKFKHSALKF

SEQ ID NO: 1983 - protein, 18 aa, Artificial
  Short Peptide
FWKLFLKIPKFKHSALKF

SEQ ID NO: 1984 - protein, 18 aa, Artificial
  Short Peptide
KKKKFLKIPKFKHSALKF

SEQ ID NO: 1985 - protein, 18 aa, Artificial
  Short Peptide
RKKKFLKIPKFKHSALKF

SEQ ID NO: 1986 - protein, 18 aa, Artificial
  Short Peptide
FKKKFLKIPKFKHSALKF

SEQ ID NO: 1987 - protein, 18 aa, Artificial
  Short Peptide
KWKKFLKIPKFKHSALKF

SEQ ID NO: 1988 - protein, 18 aa, Artificial
  Short Peptide
RWKKFLKIPKFKHSALKF

SEQ ID NO: 1989 - protein, 18 aa, Artificial
  Short Peptide
FWKKFLKIPKFKHSALKF

SEQ ID NO: 1990 - protein, 18 aa, Artificial
  Short Peptide
KKKLLLKIPKFKHSALKF

SEQ ID NO: 1991 - protein, 18 aa, Artificial
  Short Peptide
RKKLLLKIPKFKHSALKF

SEQ ID NO: 1992 - protein, 18 aa, Artificial
  Short Peptide
FKKLLLKIPKFKHSALKF

SEQ ID NO: 1993 - protein, 18 aa, Artificial
  Short Peptide
KWKLLLKIPKFKHSALKF

SEQ ID NO: 1994 - protein, 18 aa, Artificial
  Short Peptide
RWKLLLKIPKFKHSALKF

SEQ ID NO: 1995 - protein, 18 aa, Artificial
  Short Peptide
FWKLLLKIPKFKHSALKF

SEQ ID NO: 1996 - protein, 18 aa, Artificial
  Short Peptide
KKKKLLKIPKFKHSALKF

SEQ ID NO: 1997 - protein, 18 aa, Artificial
  Short Peptide
RKKKLLKIPKFKHSALKF

SEQ ID NO: 1998 - protein, 18 aa, Artificial
  Short Peptide
FKKKLLKIPKFKHSALKF

SEQ ID NO: 1999 - protein, 18 aa, Artificial
  Short Peptide
KWKKLLKIPKFKHSALKF

SEQ ID NO: 2000 - protein, 18 aa, Artificial
  Short Peptide
RWKKLLKIPKFKHSALKF

SEQ ID NO: 2001 - protein, 18 aa, Artificial
  Short Peptide
FWKKLLKIPKFKHSALKF

SEQ ID NO: 2002 - protein, 18 aa, Artificial
  Short Peptide
KKKLFKKIPKFKHSALKF

SEQ ID NO: 2003 - protein, 18 aa, Artificial
  Short Peptide
RKKLFKKIPKFKHSALKF

SEQ ID NO: 2004 - protein, 18 aa, Artificial
  Short Peptide
FKKLFKKIPKFKHSALKF

SEQ ID NO: 2005 - protein, 18 aa, Artificial
  Short Peptide
KWKLFKKIPKFKHSALKF

SEQ ID NO: 2006 - protein, 18 aa, Artificial
  Short Peptide
RWKLFKKIPKFKHSALKF

SEQ ID NO: 2007 - protein, 18 aa, Artificial
  Short Peptide
FWKLFKKIPKFKHSALKF

SEQ ID NO: 2008 - protein, 18 aa, Artificial
  Short Peptide
KKKKFKKIPKFKHSALKF

SEQ ID NO: 2009 - protein, 18 aa, Artificial
  Short Peptide
RKKKFKKIPKFKHSALKF

SEQ ID NO: 2010 - protein, 18 aa, Artificial
  Short Peptide
FKKKFKKIPKFKHSALKF

SEQ ID NO: 2011 - protein, 18 aa, Artificial
  Short Peptide
KWKKFKKIPKFKHSALKF

SEQ ID NO: 2012 - protein, 18 aa, Artificial
  Short Peptide
RWKKFKKIPKFKHSALKF

SEQ ID NO: 2013 - protein, 18 aa, Artificial
  Short Peptide
FWKKFKKIPKFKHSALKF

SEQ ID NO: 2014 - protein, 18 aa, Artificial
  Short Peptide
KKKLLKKIPKFKHSALKF

SEQ ID NO: 2015 - protein, 18 aa, Artificial
  Short Peptide
RKKLLKKIPKFKHSALKF

SEQ ID NO: 2016 - protein, 18 aa, Artificial
  Short Peptide
FKKLLKKIPKFKHSALKF

SEQ ID NO: 2017 - protein, 18 aa, Artificial
  Short Peptide
KWKLLKKIPKFKHSALKF

SEQ ID NO: 2018 - protein, 18 aa, Artificial
  Short Peptide
RWKLLKKIPKFKHSALKF

SEQ ID NO: 2019 - protein, 18 aa, Artificial
  Short Peptide
FWKLLKKIPKFKHSALKF

SEQ ID NO: 2020 - protein, 18 aa, Artificial
  Short Peptide
KKKKLKKIPKFKHSALKF

SEQ ID NO: 2021 - protein, 18 aa, Artificial
  Short Peptide
RKKKLKKIPKFKHSALKF

SEQ ID NO: 2022 - protein, 18 aa, Artificial
  Short Peptide
FKKKLKKIPKFKHSALKF

SEQ ID NO: 2023 - protein, 18 aa, Artificial
  Short Peptide
KWKKLKKIPKFKHSALKF

SEQ ID NO: 2024 - protein, 18 aa, Artificial
  Short Peptide
RWKKLKKIPKFKHSALKF

SEQ ID NO: 2025 - protein, 18 aa, Artificial
  Short Peptide
FWKKLKKIPKFKHSALKF

SEQ ID NO: 2026 - protein, 20 aa, Artificial
  Short Peptide
KKKLFLKIPPPKFLKSALKF

SEQ ID NO: 2027 - protein, 20 aa, Artificial
  Short Peptide
RKKLFLKIPPPKFLKSALKF

SEQ ID NO: 2028 - protein, 20 aa, Artificial
  Short Peptide
FKKLFLKIPPPKFLKSALKF

SEQ ID NO: 2029 - protein, 20 aa, Artificial
  Short Peptide
KWKLFLKIPPPKFLKSALKF

SEQ ID NO: 2030 - protein, 20 aa, Artificial
  Short Peptide
RWKLFLKIPPPKFLKSALKF

SEQ ID NO: 2031 - protein, 20 aa, Artificial
  Short Peptide
FWKLFLKIPPPKFLKSALKF

SEQ ID NO: 2032 - protein, 20 aa, Artificial
  Short Peptide
KKKKFLKIPPPKFLKSALKF

SEQ ID NO: 2033 - protein, 20 aa, Artificial
  Short Peptide
RKKKFLKIPPPKFLKSALKF

SEQ ID NO: 2034 - protein, 20 aa, Artificial
  Short Peptide
FKKKFLKIPPPKFLKSALKF

SEQ ID NO: 2035 - protein, 20 aa, Artificial
  Short Peptide
KWKKFLKIPPPKFLKSALKF

SEQ ID NO: 2036 - protein, 20 aa, Artificial
  Short Peptide
RWKKFLKIPPPKFLKSALKF

SEQ ID NO: 2037 - protein, 20 aa, Artificial
  Short Peptide
FWKKFLKIPPPKFLKSALKF

SEQ ID NO: 2038 - protein, 20 aa, Artificial
  Short Peptide
KKKLLLKIPPPKFLKSALKF

SEQ ID NO: 2039 - protein, 20 aa, Artificial
  Short Peptide
RKKLLLKIPPPKFLKSALKF

SEQ ID NO: 2040 - protein, 20 aa, Artificial
  Short Peptide
FKKLLLKIPPPKFLKSALKF

SEQ ID NO: 2041 - protein, 20 aa, Artificial
  Short Peptide
KWKLLLKIPPPKFLKSALKF

SEQ ID NO: 2042 - protein, 20 aa, Artificial
  Short Peptide
RWKLLLKIPPPKFLKSALKF

SEQ ID NO: 2043 - protein, 20 aa, Artificial
  Short Peptide
FWKLLLKIPPPKFLKSALKF

SEQ ID NO: 2044 - protein, 20 aa, Artificial
  Short Peptide
KKKKLLKIPPPKFLKSALKF

SEQ ID NO: 2045 - protein, 20 aa, Artificial
  Short Peptide
RKKKLLKIPPPKFLKSALKF

SEQ ID NO: 2046 - protein, 20 aa, Artificial
  Short Peptide
FKKKLLKIPPPKFLKSALKF

SEQ ID NO: 2047 - protein, 20 aa, Artificial
  Short Peptide
KWKKLLKIPPPKFLKSALKF

SEQ ID NO: 2048 - protein, 20 aa, Artificial
  Short Peptide
RWKKLLKIPPPKFLKSALKF

SEQ ID NO: 2049 - protein, 20 aa, Artificial
  Short Peptide
FWKKLLKIPPPKFLKSALKF

SEQ ID NO: 2050 - protein, 20 aa, Artificial
  Short Peptide
KKKLFKKIPPPKFLKSALKF

SEQ ID NO: 2051 - protein, 20 aa, Artificial
  Short Peptide
RKKLFKKIPPPKFLKSALKF

SEQ ID NO: 2052 - protein, 20 aa, Artificial
  Short Peptide
FKKLFKKIPPPKFLKSALKF

SEQ ID NO: 2053 - protein, 20 aa, Artificial
  Short Peptide
KWKLFKKIPPPKFLKSALKF

SEQ ID NO: 2054 - protein, 20 aa, Artificial
  Short Peptide
RWKLFKKIPPPKFLKSALKF

SEQ ID NO: 2055 - protein, 20 aa, Artificial
  Short Peptide
FWKLFKKIPPPKFLKSALKF

SEQ ID NO: 2056 - protein, 20 aa, Artificial
  Short Peptide
KKKKFKKIPPPKFLKSALKF

SEQ ID NO: 2057 - protein, 20 aa, Artificial
  Short Peptide
RKKKFKKIPPPKFLKSALKF

SEQ ID NO: 2058 - protein, 20 aa, Artificial
  Short Peptide
FKKKFKKIPPPKFLKSALKF

SEQ ID NO: 2059 - protein, 20 aa, Artificial
  Short Peptide
KWKKFKKIPPPKFLKSALKF

SEQ ID NO: 2060 - protein, 20 aa, Artificial
  Short Peptide
RWKKFKKIPPPKFLKSALKF

SEQ ID NO: 2061 - protein, 20 aa, Artificial
  Short Peptide
FWKKFKKIPPPKFLKSALKF

SEQ ID NO: 2062 - protein, 20 aa, Artificial
  Short Peptide
KKKLLKKIPPPKFLKSALKF

SEQ ID NO: 2063 - protein, 20 aa, Artificial
  Short Peptide
RKKLLKKIPPPKFLKSALKF

SEQ ID NO: 2064 - protein, 20 aa, Artificial
  Short Peptide
FKKLLKKIPPPKFLKSALKF

SEQ ID NO: 2065 - protein, 20 aa, Artificial
  Short Peptide
KWKLLKKIPPPKFLKSALKF

SEQ ID NO: 2066 - protein, 20 aa, Artificial
  Short Peptide
RWKLLKKIPPPKFLKSALKF

SEQ ID NO: 2067 - protein, 20 aa, Artificial
  Short Peptide
FWKLLKKIPPPKFLKSALKF

SEQ ID NO: 2068 - protein, 20 aa, Artificial
  Short Peptide
KKKKLKKIPPPKFLKSALKF

SEQ ID NO: 2069 - protein, 20 aa, Artificial
  Short Peptide
RKKKLKKIPPPKFLKSALKF

SEQ ID NO: 2070 - protein, 20 aa, Artificial
  Short Peptide
FKKKLKKIPPPKFLKSALKF

SEQ ID NO: 2071 - protein, 20 aa, Artificial
  Short Peptide
KWKKLKKIPPPKFLKSALKF

SEQ ID NO: 2072 - protein, 20 aa, Artificial
  Short Peptide
RWKKLKKIPPPKFLKSALKF

SEQ ID NO: 2073 - protein, 20 aa, Artificial
  Short Peptide
FWKKLKKIPPPKFLKSALKF

SEQ ID NO: 2074 - protein, 19 aa, Artificial
  Short Peptide
KKKLFLKIPPKFLKSALKF

SEQ ID NO: 2075 - protein, 19 aa, Artificial
  Short Peptide
RKKLFLKIPPKFLKSALKF

SEQ ID NO: 2076 - protein, 19 aa, Artificial
  Short Peptide
FKKLFLKIPPKFLKSALKF

SEQ ID NO: 2077 - protein, 19 aa, Artificial
  Short Peptide
KWKLFLKIPPKFLKSALKF

SEQ ID NO: 2078 - protein, 19 aa, Artificial
  Short Peptide
RWKLFLKIPPKFLKSALKF

SEQ ID NO: 2079 - protein, 19 aa, Artificial
  Short Peptide
FWKLFLKIPPKFLKSALKF

SEQ ID NO: 2080 - protein, 19 aa, Artificial
  Short Peptide
KKKKFLKIPPKFLKSALKF

SEQ ID NO: 2081 - protein, 19 aa, Artificial
  Short Peptide
RKKKFLKIPPKFLKSALKF

SEQ ID NO: 2082 - protein, 19 aa, Artificial
  Short Peptide
FKKKFLKIPPKFLKSALKF

SEQ ID NO: 2083 - protein, 19 aa, Artificial
  Short Peptide
KWKKFLKIPPKFLKSALKF

SEQ ID NO: 2084 - protein, 19 aa, Artificial
  Short Peptide
RWKKFLKIPPKFLKSALKF

SEQ ID NO: 2085 - protein, 19 aa, Artificial
  Short Peptide
FWKKFLKIPPKFLKSALKF

SEQ ID NO: 2086 - protein, 19 aa, Artificial
  Short Peptide
KKKLLLKIPPKFLKSALKF

SEQ ID NO: 2087 - protein, 19 aa, Artificial
  Short Peptide
RKKLLLKIPPKFLKSALKF

SEQ ID NO: 2088 - protein, 19 aa, Artificial
  Short Peptide
FKKLLLKIPPKFLKSALKF

SEQ ID NO: 2089 - protein, 19 aa, Artificial
  Short Peptide
KWKLLLKIPPKFLKSALKF

SEQ ID NO: 2090 - protein, 19 aa, Artificial
  Short Peptide
RWKLLLKIPPKFLKSALKF

SEQ ID NO: 2091 - protein, 19 aa, Artificial
  Short Peptide
FWKLLLKIPPKFLKSALKF

SEQ ID NO: 2092 - protein, 19 aa, Artificial
  Short Peptide
KKKKLLKIPPKFLKSALKF

SEQ ID NO: 2093 - protein, 19 aa, Artificial
  Short Peptide
RKKKLLKIPPKFLKSALKF

SEQ ID NO: 2094 - protein, 19 aa, Artificial
  Short Peptide
FKKKLLKIPPKFLKSALKF

SEQ ID NO: 2095 - protein, 19 aa, Artificial
  Short Peptide
KWKKLLKIPPKFLKSALKF

SEQ ID NO: 2096 - protein, 19 aa, Artificial
  Short Peptide
RWKKLLKIPPKFLKSALKF

SEQ ID NO: 2097 - protein, 19 aa, Artificial
  Short Peptide
FWKKLLKIPPKFLKSALKF

SEQ ID NO: 2098 - protein, 19 aa, Artificial
  Short Peptide
KKKLFKKIPPKFLKSALKF

SEQ ID NO: 2099 - protein, 19 aa, Artificial
  Short Peptide
RKKLFKKIPPKFLKSALKF

SEQ ID NO: 2100 - protein, 19 aa, Artificial
  Short Peptide
FKKLFKKIPPKFLKSALKF

SEQ ID NO: 2101 - protein, 19 aa, Artificial
  Short Peptide
KWKLFKKIPPKFLKSALKF

SEQ ID NO: 2102 - protein, 19 aa, Artificial
  Short Peptide
RWKLFKKIPPKFLKSALKF

SEQ ID NO: 2103 - protein, 19 aa, Artificial
  Short Peptide
FWKLFKKIPPKFLKSALKF

SEQ ID NO: 2104 - protein, 19 aa, Artificial
  Short Peptide
KKKKFKKIPPKFLKSALKF

SEQ ID NO: 2105 - protein, 19 aa, Artificial
  Short Peptide
RKKKFKKIPPKFLKSALKF

SEQ ID NO: 2106 - protein, 19 aa, Artificial
  Short Peptide
FKKKFKKIPPKFLKSALKF

SEQ ID NO: 2107 - protein, 19 aa, Artificial
  Short Peptide
KWKKFKKIPPKFLKSALKF

SEQ ID NO: 2108 - protein, 19 aa, Artificial
  Short Peptide
RWKKFKKIPPKFLKSALKF

SEQ ID NO: 2109 - protein, 19 aa, Artificial
  Short Peptide
FWKKFKKIPPKFLKSALKF

SEQ ID NO: 2110 - protein, 19 aa, Artificial
  Short Peptide
KKKLLKKIPPKFLKSALKF

SEQ ID NO: 2111 - protein, 19 aa, Artificial
  Short Peptide
RKKLLKKIPPKFLKSALKF

SEQ ID NO: 2112 - protein, 19 aa, Artificial
  Short Peptide
FKKLLKKIPPKFLKSALKF

SEQ ID NO: 2113 - protein, 19 aa, Artificial
  Short Peptide
KWKLLKKIPPKFLKSALKF

SEQ ID NO: 2114 - protein, 19 aa, Artificial
  Short Peptide
RWKLLKKIPPKFLKSALKF

SEQ ID NO: 2115 - protein, 19 aa, Artificial
  Short Peptide
FWKLLKKIPPKFLKSALKF

SEQ ID NO: 2116 - protein, 19 aa, Artificial
  Short Peptide
KKKKLKKIPPKFLKSALKF

SEQ ID NO: 2117 - protein, 19 aa, Artificial
  Short Peptide
RKKKLKKIPPKFLKSALKF

SEQ ID NO: 2118 - protein, 19 aa, Artificial
  Short Peptide
FKKKLKKIPPKFLKSALKF

SEQ ID NO: 2119 - protein, 19 aa, Artificial
  Short Peptide
KWKKLKKIPPKFLKSALKF

SEQ ID NO: 2120 - protein, 19 aa, Artificial
  Short Peptide
RWKKLKKIPPKFLKSALKF

SEQ ID NO: 2121 - protein, 19 aa, Artificial
  Short Peptide
FWKKLKKIPPKFLKSALKF

SEQ ID NO: 2122 - protein, 18 aa, Artificial
  Short Peptide
KKKLFLKIPKFLKSALKF

SEQ ID NO: 2123 - protein, 18 aa, Artificial
  Short Peptide
RKKLFLKIPKFLKSALKF

SEQ ID NO: 2124 - protein, 18 aa, Artificial
  Short Peptide
FKKLFLKIPKFLKSALKF

SEQ ID NO: 2125 - protein, 18 aa, Artificial
  Short Peptide
KWKLFLKIPKFLKSALKF

SEQ ID NO: 2126 - protein, 18 aa, Artificial
  Short Peptide
RWKLFLKIPKFLKSALKF

SEQ ID NO: 2127 - protein, 18 aa, Artificial
  Short Peptide
FWKLFLKIPKFLKSALKF

SEQ ID NO: 2128 - protein, 18 aa, Artificial
  Short Peptide
KKKKFLKIPKFLKSALKF

SEQ ID NO: 2129 - protein, 18 aa, Artificial
  Short Peptide
RKKKFLKIPKFLKSALKF

SEQ ID NO: 2130 - protein, 18 aa, Artificial
  Short Peptide
FKKKFLKIPKFLKSALKF

SEQ ID NO: 2131 - protein, 18 aa, Artificial
  Short Peptide
KWKKFLKIPKFLKSALKF

SEQ ID NO: 2132 - protein, 18 aa, Artificial
  Short Peptide
RWKKFLKIPKFLKSALKF

SEQ ID NO: 2133 - protein, 18 aa, Artificial
  Short Peptide
FWKKFLKIPKFLKSALKF

SEQ ID NO: 2134 - protein, 18 aa, Artificial
  Short Peptide
KKKLLLKIPKFLKSALKF

SEQ ID NO: 2135 - protein, 18 aa, Artificial
  Short Peptide
RKKLLLKIPKFLKSALKF

SEQ ID NO: 2136 - protein, 18 aa, Artificial
  Short Peptide
FKKLLLKIPKFLKSALKF

SEQ ID NO: 2137 - protein, 18 aa, Artificial
  Short Peptide
KWKLLLKIPKFLKSALKF

SEQ ID NO: 2138 - protein, 18 aa, Artificial
  Short Peptide
RWKLLLKIPKFLKSALKF

SEQ ID NO: 2139 - protein, 18 aa, Artificial
  Short Peptide
FWKLLLKIPKFLKSALKF

SEQ ID NO: 2140 - protein, 18 aa, Artificial
  Short Peptide
KKKKLLKIPKFLKSALKF

SEQ ID NO: 2141 - protein, 18 aa, Artificial
  Short Peptide
RKKKLLKIPKFLKSALKF

SEQ ID NO: 2142 - protein, 18 aa, Artificial
  Short Peptide
FKKKLLKIPKFLKSALKF

SEQ ID NO: 2143 - protein, 18 aa, Artificial
  Short Peptide
KWKKLLKIPKFLKSALKF

SEQ ID NO: 2144 - protein, 18 aa, Artificial
  Short Peptide
RWKKLLKIPKFLKSALKF

SEQ ID NO: 2145 - protein, 18 aa, Artificial
  Short Peptide
FWKKLLKIPKFLKSALKF

SEQ ID NO: 2146 - protein, 18 aa, Artificial
  Short Peptide
KKKLFKKIPKFLKSALKF

SEQ ID NO: 2147 - protein, 18 aa, Artificial
  Short Peptide
RKKLFKKIPKFLKSALKF

SEQ ID NO: 2148 - protein, 18 aa, Artificial
  Short Peptide
FKKLFKKIPKFLKSALKF

SEQ ID NO: 2149 - protein, 18 aa, Artificial
  Short Peptide
KWKLFKKIPKFLKSALKF

SEQ ID NO: 2150 - protein, 18 aa, Artificial
  Short Peptide
RWKLFKKIPKFLKSALKF

SEQ ID NO: 2151 - protein, 18 aa, Artificial
  Short Peptide
FWKLFKKIPKFLKSALKF

SEQ ID NO: 2152 - protein, 18 aa, Artificial
  Short Peptide
KKKKFKKIPKFLKSALKF

SEQ ID NO: 2153 - protein, 18 aa, Artificial
  Short Peptide
RKKKFKKIPKFLKSALKF

SEQ ID NO: 2154 - protein, 18 aa, Artificial
  Short Peptide
FKKKFKKIPKFLKSALKF

SEQ ID NO: 2155 - protein, 18 aa, Artificial
  Short Peptide
KWKKFKKIPKFLKSALKF

SEQ ID NO: 2156 - protein, 18 aa, Artificial
  Short Peptide
RWKKFKKIPKFLKSALKF

SEQ ID NO: 2157 - protein, 18 aa, Artificial
  Short Peptide
FWKKFKKIPKFLKSALKF

SEQ ID NO: 2158 - protein, 18 aa, Artificial
  Short Peptide
KKKLLKKIPKFLKSALKF

SEQ ID NO: 2159 - protein, 18 aa, Artificial
  Short Peptide
RKKLLKKIPKFLKSALKF

SEQ ID NO: 2160 - protein, 18 aa, Artificial
  Short Peptide
FKKLLKKIPKFLKSALKF

SEQ ID NO: 2161 - protein, 18 aa, Artificial
  Short Peptide
KWKLLKKIPKFLKSALKF

SEQ ID NO: 2162 - protein, 18 aa, Artificial
  Short Peptide
RWKLLKKIPKFLKSALKF

SEQ ID NO: 2163 - protein, 18 aa, Artificial
  Short Peptide
FWKLLKKIPKFLKSALKF

SEQ ID NO: 2164 - protein, 18 aa, Artificial
  Short Peptide
KKKKLKKIPKFLKSALKF

SEQ ID NO: 2165 - protein, 18 aa, Artificial
  Short Peptide
RKKKLKKIPKFLKSALKF

SEQ ID NO: 2166 - protein, 18 aa, Artificial
  Short Peptide
FKKKLKKIPKFLKSALKF

SEQ ID NO: 2167 - protein, 18 aa, Artificial
  Short Peptide
KWKKLKKIPKFLKSALKF

SEQ ID NO: 2168 - protein, 18 aa, Artificial
  Short Peptide
RWKKLKKIPKFLKSALKF

SEQ ID NO: 2169 - protein, 18 aa, Artificial
  Short Peptide
FWKKLKKIPKFLKSALKF

SEQ ID NO: 2170 - protein, 20 aa, Artificial
  Short Peptide
KKKLFLKIPPPKFKKSALKF

SEQ ID NO: 2171 - protein, 20 aa, Artificial
  Short Peptide
RKKLFLKIPPPKFKKSALKF

SEQ ID NO: 2172 - protein, 20 aa, Artificial
  Short Peptide
FKKLFLKIPPPKFKKSALKF

SEQ ID NO: 2173 - protein, 20 aa, Artificial
  Short Peptide
KWKLFLKIPPPKFKKSALKF

SEQ ID NO: 2174 - protein, 20 aa, Artificial
  Short Peptide
RWKLFLKIPPPKFKKSALKF

SEQ ID NO: 2175 - protein, 20 aa, Artificial
  Short Peptide
FWKLFLKIPPPKFKKSALKF

SEQ ID NO: 2176 - protein, 20 aa, Artificial
  Short Peptide
KKKKFLKIPPPKFKKSALKF

SEQ ID NO: 2177 - protein, 20 aa, Artificial
  Short Peptide
RKKKFLKIPPPKFKKSALKF

SEQ ID NO: 2178 - protein, 20 aa, Artificial
  Short Peptide
FKKKFLKIPPPKFKKSALKF

SEQ ID NO: 2179 - protein, 20 aa, Artificial
  Short Peptide
KWKKFLKIPPPKFKKSALKF

SEQ ID NO: 2180 - protein, 20 aa, Artificial
  Short Peptide
RWKKFLKIPPPKFKKSALKF

SEQ ID NO: 2181 - protein, 20 aa, Artificial
  Short Peptide
FWKKFLKIPPPKFKKSALKF

SEQ ID NO: 2182 - protein, 20 aa, Artificial
  Short Peptide
KKKLLLKIPPPKFKKSALKF

SEQ ID NO: 2183 - protein, 20 aa, Artificial
  Short Peptide
RKKLLLKIPPPKFKKSALKF

SEQ ID NO: 2184 - protein, 20 aa, Artificial
  Short Peptide
FKKLLLKIPPPKFKKSALKF

SEQ ID NO: 2185 - protein, 20 aa, Artificial
  Short Peptide
KWKLLLKIPPPKFKKSALKF

SEQ ID NO: 2186 - protein, 20 aa, Artificial
  Short Peptide
RWKLLLKIPPPKFKKSALKF

SEQ ID NO: 2187 - protein, 20 aa, Artificial
  Short Peptide
FWKLLLKIPPPKFKKSALKF

SEQ ID NO: 2188 - protein, 20 aa, Artificial
  Short Peptide
KKKKLLKIPPPKFKKSALKF

SEQ ID NO: 2189 - protein, 20 aa, Artificial
  Short Peptide
RKKKLLKIPPPKFKKSALKF

SEQ ID NO: 2190 - protein, 20 aa, Artificial
  Short Peptide
FKKKLLKIPPPKFKKSALKF

SEQ ID NO: 2191 - protein, 20 aa, Artificial
  Short Peptide
KWKKLLKIPPPKFKKSALKF

SEQ ID NO: 2192 - protein, 20 aa, Artificial
  Short Peptide
RWKKLLKIPPPKFKKSALKF

SEQ ID NO: 2193 - protein, 20 aa, Artificial
  Short Peptide
FWKKLLKIPPPKFKKSALKF

SEQ ID NO: 2194 - protein, 20 aa, Artificial
  Short Peptide
KKKLFKKIPPPKFKKSALKF

SEQ ID NO: 2195 - protein, 20 aa, Artificial
  Short Peptide
RKKLFKKIPPPKFKKSALKF

SEQ ID NO: 2196 - protein, 20 aa, Artificial
  Short Peptide
FKKLFKKIPPPKFKKSALKF

SEQ ID NO: 2197 - protein, 20 aa, Artificial
  Short Peptide
KWKLFKKIPPPKFKKSALKF

SEQ ID NO: 2198 - protein, 20 aa, Artificial
  Short Peptide
RWKLFKKIPPPKFKKSALKF

SEQ ID NO: 2199 - protein, 20 aa, Artificial
  Short Peptide
FWKLFKKIPPPKFKKSALKF

SEQ ID NO: 2200 - protein, 20 aa, Artificial
  Short Peptide
KKKKFKKIPPPKFKKSALKF

SEQ ID NO: 2201 - protein, 20 aa, Artificial
  Short Peptide
RKKKFKKIPPPKFKKSALKF

SEQ ID NO: 2202 - protein, 20 aa, Artificial
  Short Peptide
FKKKFKKIPPPKFKKSALKF

SEQ ID NO: 2203 - protein, 20 aa, Artificial
  Short Peptide
KWKKFKKIPPPKFKKSALKF

SEQ ID NO: 2204 - protein, 20 aa, Artificial
  Short Peptide
RWKKFKKIPPPKFKKSALKF

SEQ ID NO: 2205 - protein, 20 aa, Artificial
  Short Peptide
FWKKFKKIPPPKFKKSALKF

SEQ ID NO: 2206 - protein, 20 aa, Artificial
  Short Peptide
KKKLLKKIPPPKFKKSALKF

SEQ ID NO: 2207 - protein, 20 aa, Artificial
  Short Peptide
RKKLLKKIPPPKFKKSALKF

SEQ ID NO: 2208 - protein, 20 aa, Artificial
  Short Peptide
FKKLLKKIPPPKFKKSALKF

SEQ ID NO: 2209 - protein, 20 aa, Artificial
  Short Peptide
KWKLLKKIPPPKFKKSALKF

SEQ ID NO: 2210 - protein, 20 aa, Artificial
  Short Peptide
RWKLLKKIPPPKFKKSALKF

SEQ ID NO: 2211 - protein, 20 aa, Artificial
  Short Peptide
FWKLLKKIPPPKFKKSALKF

SEQ ID NO: 2212 - protein, 20 aa, Artificial
  Short Peptide
KKKKLKKIPPPKFKKSALKF

SEQ ID NO: 2213 - protein, 20 aa, Artificial
  Short Peptide
RKKKLKKIPPPKFKKSALKF

SEQ ID NO: 2214 - protein, 20 aa, Artificial
  Short Peptide
FKKKLKKIPPPKFKKSALKF

SEQ ID NO: 2215 - protein, 20 aa, Artificial
  Short Peptide
KWKKLKKIPPPKFKKSALKF

SEQ ID NO: 2216 - protein, 20 aa, Artificial
  Short Peptide
RWKKLKKIPPPKFKKSALKF

SEQ ID NO: 2217 - protein, 20 aa, Artificial
  Short Peptide
FWKKLKKIPPPKFKKSALKF

SEQ ID NO: 2218 - protein, 19 aa, Artificial
  Short Peptide
KKKLFLKIPPKFKKSALKF

SEQ ID NO: 2219 - protein, 19 aa, Artificial
  Short Peptide
RKKLFLKIPPKFKKSALKF

SEQ ID NO: 2220 - protein, 19 aa, Artificial
  Short Peptide
FKKLFLKIPPKFKKSALKF

SEQ ID NO: 2221 - protein, 19 aa, Artificial
  Short Peptide
KWKLFLKIPPKFKKSALKF

SEQ ID NO: 2222 - protein, 19 aa, Artificial
  Short Peptide
RWKLFLKIPPKFKKSALKF

SEQ ID NO: 2223 - protein, 19 aa, Artificial
  Short Peptide
FWKLFLKIPPKFKKSALKF

SEQ ID NO: 2224 - protein, 19 aa, Artificial
  Short Peptide
KKKKFLKIPPKFKKSALKF

SEQ ID NO: 2225 - protein, 19 aa, Artificial
  Short Peptide
RKKKFLKIPPKFKKSALKF

SEQ ID NO: 2226 - protein, 19 aa, Artificial
  Short Peptide
FKKKFLKIPPKFKKSALKF

SEQ ID NO: 2227 - protein, 19 aa, Artificial
  Short Peptide
KWKKFLKIPPKFKKSALKF

SEQ ID NO: 2228 - protein, 19 aa, Artificial
  Short Peptide
RWKKFLKIPPKFKKSALKF

SEQ ID NO: 2229 - protein, 19 aa, Artificial
  Short Peptide
FWKKFLKIPPKFKKSALKF

SEQ ID NO: 2230 - protein, 19 aa, Artificial
  Short Peptide
KKKLLLKIPPKFKKSALKF

SEQ ID NO: 2231 - protein, 19 aa, Artificial
  Short Peptide
RKKLLLKIPPKFKKSALKF

SEQ ID NO: 2232 - protein, 19 aa, Artificial
  Short Peptide
FKKLLLKIPPKFKKSALKF

SEQ ID NO: 2233 - protein, 19 aa, Artificial
  Short Peptide
KWKLLLKIPPKFKKSALKF

SEQ ID NO: 2234 - protein, 19 aa, Artificial
  Short Peptide
RWKLLLKIPPKFKKSALKF

SEQ ID NO: 2235 - protein, 19 aa, Artificial
  Short Peptide
FWKLLLKIPPKFKKSALKF

SEQ ID NO: 2236 - protein, 19 aa, Artificial
  Short Peptide
KKKKLLKIPPKFKKSALKF

SEQ ID NO: 2237 - protein, 19 aa, Artificial
  Short Peptide
RKKKLLKIPPKFKKSALKF

SEQ ID NO: 2238 - protein, 19 aa, Artificial
  Short Peptide
FKKKLLKIPPKFKKSALKF

SEQ ID NO: 2239 - protein, 19 aa, Artificial
  Short Peptide
KWKKLLKIPPKFKKSALKF

SEQ ID NO: 2240 - protein, 19 aa, Artificial
  Short Peptide
RWKKLLKIPPKFKKSALKF

SEQ ID NO: 2241 - protein, 19 aa, Artificial
  Short Peptide
FWKKLLKIPPKFKKSALKF

SEQ ID NO: 2242 - protein, 19 aa, Artificial
  Short Peptide
KKKLFKKIPPKFKKSALKF

SEQ ID NO: 2243 - protein, 19 aa, Artificial
  Short Peptide
RKKLFKKIPPKFKKSALKF

SEQ ID NO: 2244 - protein, 19 aa, Artificial
  Short Peptide
FKKLFKKIPPKFKKSALKF

SEQ ID NO: 2245 - protein, 19 aa, Artificial
  Short Peptide
KWKLFKKIPPKFKKSALKF

SEQ ID NO: 2246 - protein, 19 aa, Artificial
  Short Peptide
RWKLFKKIPPKFKKSALKF

SEQ ID NO: 2247 - protein, 19 aa, Artificial
  Short Peptide
FWKLFKKIPPKFKKSALKF

SEQ ID NO: 2248 - protein, 19 aa, Artificial
  Short Peptide
KKKKFKKIPPKFKKSALKF

SEQ ID NO: 2249 - protein, 19 aa, Artificial
  Short Peptide
RKKKFKKIPPKFKKSALKF

SEQ ID NO: 2250 - protein, 19 aa, Artificial
  Short Peptide
FKKKFKKIPPKFKKSALKF

SEQ ID NO: 2251 - protein, 19 aa, Artificial
  Short Peptide
KWKKFKKIPPKFKKSALKF

SEQ ID NO: 2252 - protein, 19 aa, Artificial
  Short Peptide
RWKKFKKIPPKFKKSALKF

SEQ ID NO: 2253 - protein, 19 aa, Artificial
  Short Peptide
FWKKFKKIPPKFKKSALKF

SEQ ID NO: 2254 - protein, 19 aa, Artificial
  Short Peptide
KKKLLKKIPPKFKKSALKF

SEQ ID NO: 2255 - protein, 19 aa, Artificial
  Short Peptide
RKKLLKKIPPKFKKSALKF

SEQ ID NO: 2256 - protein, 19 aa, Artificial
  Short Peptide
FKKLLKKIPPKFKKSALKF

SEQ ID NO: 2257 - protein, 19 aa, Artificial
  Short Peptide
KWKLLKKIPPKFKKSALKF

SEQ ID NO: 2258 - protein, 19 aa, Artificial
  Short Peptide
RWKLLKKIPPKFKKSALKF

SEQ ID NO: 2259 - protein, 19 aa, Artificial
  Short Peptide
FWKLLKKIPPKFKKSALKF

SEQ ID NO: 2260 - protein, 19 aa, Artificial
  Short Peptide
KKKKLKKIPPKFKKSALKF

SEQ ID NO: 2261 - protein, 19 aa, Artificial
  Short Peptide
RKKKLKKIPPKFKKSALKF

SEQ ID NO: 2262 - protein, 19 aa, Artificial
  Short Peptide
FKKKLKKIPPKFKKSALKF

SEQ ID NO: 2263 - protein, 19 aa, Artificial
  Short Peptide
KWKKLKKIPPKFKKSALKF

SEQ ID NO: 2264 - protein, 19 aa, Artificial
  Short Peptide
RWKKLKKIPPKFKKSALKF

SEQ ID NO: 2265 - protein, 19 aa, Artificial
  Short Peptide
FWKKLKKIPPKFKKSALKF

SEQ ID NO: 2266 - protein, 18 aa, Artificial
  Short Peptide
KKKLFLKIPKFKKSALKF

SEQ ID NO: 2267 - protein, 18 aa, Artificial
  Short Peptide
RKKLFLKIPKFKKSALKF

SEQ ID NO: 2268 - protein, 18 aa, Artificial
  Short Peptide
FKKLFLKIPKFKKSALKF

SEQ ID NO: 2269 - protein, 18 aa, Artificial
  Short Peptide
KWKLFLKIPKFKKSALKF

SEQ ID NO: 2270 - protein, 18 aa, Artificial
  Short Peptide
RWKLFLKIPKFKKSALKF

SEQ ID NO: 2271 - protein, 18 aa, Artificial
  Short Peptide
FWKLFLKIPKFKKSALKF

SEQ ID NO: 2272 - protein, 18 aa, Artificial
  Short Peptide
KKKKFLKIPKFKKSALKF

SEQ ID NO: 2273 - protein, 18 aa, Artificial
  Short Peptide
RKKKFLKIPKFKKSALKF

SEQ ID NO: 2274 - protein, 18 aa, Artificial
  Short Peptide
FKKKFLKIPKFKKSALKF

SEQ ID NO: 2275 - protein, 18 aa, Artificial
  Short Peptide
KWKKFLKIPKFKKSALKF

SEQ ID NO: 2276 - protein, 18 aa, Artificial
  Short Peptide
RWKKFLKIPKFKKSALKF

SEQ ID NO: 2277 - protein, 18 aa, Artificial
  Short Peptide
FWKKFLKIPKFKKSALKF

SEQ ID NO: 2278 - protein, 18 aa, Artificial
  Short Peptide
KKKLLLKIPKFKKSALKF

SEQ ID NO: 2279 - protein, 18 aa, Artificial
  Short Peptide
RKKLLLKIPKFKKSALKF

SEQ ID NO: 2280 - protein, 18 aa, Artificial
  Short Peptide
FKKLLLKIPKFKKSALKF

SEQ ID NO: 2281 - protein, 18 aa, Artificial
  Short Peptide
KWKLLLKIPKFKKSALKF

SEQ ID NO: 2282 - protein, 18 aa, Artificial
  Short Peptide
RWKLLLKIPKFKKSALKF

SEQ ID NO: 2283 - protein, 18 aa, Artificial
  Short Peptide
FWKLLLKIPKFKKSALKF

SEQ ID NO: 2284 - protein, 18 aa, Artificial
  Short Peptide
KKKKLLKIPKFKKSALKF

SEQ ID NO: 2285 - protein, 18 aa, Artificial
  Short Peptide
RKKKLLKIPKFKKSALKF

SEQ ID NO: 2286 - protein, 18 aa, Artificial
  Short Peptide
FKKKLLKIPKFKKSALKF

SEQ ID NO: 2287 - protein, 18 aa, Artificial
  Short Peptide
KWKKLLKIPKFKKSALKF

SEQ ID NO: 2288 - protein, 18 aa, Artificial
  Short Peptide
RWKKLLKIPKFKKSALKF

SEQ ID NO: 2289 - protein, 18 aa, Artificial
  Short Peptide
FWKKLLKIPKFKKSALKF

SEQ ID NO: 2290 - protein, 18 aa, Artificial
  Short Peptide
KKKLFKKIPKFKKSALKF

SEQ ID NO: 2291 - protein, 18 aa, Artificial
  Short Peptide
RKKLFKKIPKFKKSALKF

SEQ ID NO: 2292 - protein, 18 aa, Artificial
  Short Peptide
FKKLFKKIPKFKKSALKF

SEQ ID NO: 2293 - protein, 18 aa, Artificial
  Short Peptide
KWKLFKKIPKFKKSALKF

SEQ ID NO: 2294 - protein, 18 aa, Artificial
  Short Peptide
RWKLFKKIPKFKKSALKF

SEQ ID NO: 2295 - protein, 18 aa, Artificial
  Short Peptide
FWKLFKKIPKFKKSALKF

SEQ ID NO: 2296 - protein, 18 aa, Artificial
  Short Peptide
KKKKFKKIPKFKKSALKF

SEQ ID NO: 2297 - protein, 18 aa, Artificial
  Short Peptide
RKKKFKKIPKFKKSALKF

SEQ ID NO: 2298 - protein, 18 aa, Artificial
  Short Peptide
FKKKFKKIPKFKKSALKF

SEQ ID NO: 2299 - protein, 18 aa, Artificial
  Short Peptide
KWKKFKKIPKFKKSALKF

SEQ ID NO: 2300 - protein, 18 aa, Artificial
  Short Peptide
RWKKFKKIPKFKKSALKF

SEQ ID NO: 2301 - protein, 18 aa, Artificial
  Short Peptide
FWKKFKKIPKFKKSALKF

SEQ ID NO: 2302 - protein, 18 aa, Artificial
  Short Peptide
KKKLLKKIPKFKKSALKF

SEQ ID NO: 2303 - protein, 18 aa, Artificial
  Short Peptide
RKKLLKKIPKFKKSALKF

SEQ ID NO: 2304 - protein, 18 aa, Artificial
  Short Peptide
FKKLLKKIPKFKKSALKF

SEQ ID NO: 2305 - protein, 18 aa, Artificial
  Short Peptide
KWKLLKKIPKFKKSALKF

SEQ ID NO: 2306 - protein, 18 aa, Artificial
  Short Peptide
RWKLLKKIPKFKKSALKF

SEQ ID NO: 2307 - protein, 18 aa, Artificial
  Short Peptide
FWKLLKKIPKFKKSALKF

SEQ ID NO: 2308 - protein, 18 aa, Artificial
  Short Peptide
KKKKLKKIPKFKKSALKF

SEQ ID NO: 2309 - protein, 18 aa, Artificial
  Short Peptide
RKKKLKKIPKFKKSALKF

SEQ ID NO: 2310 - protein, 18 aa, Artificial
  Short Peptide
FKKKLKKIPKFKKSALKF

SEQ ID NO: 2311 - protein, 18 aa, Artificial
  Short Peptide
KWKKLKKIPKFKKSALKF

SEQ ID NO: 2312 - protein, 18 aa, Artificial
  Short Peptide
RWKKLKKIPKFKKSALKF

SEQ ID NO: 2313 - protein, 18 aa, Artificial
  Short Peptide
FWKKLKKIPKFKKSALKF

SEQ ID NO: 2314 - protein, 20 aa, Artificial
  Short Peptide
KKKLFLKIPPPKFLHAAKKF

SEQ ID NO: 2315 - protein, 20 aa, Artificial
  Short Peptide
RKKLFLKIPPPKFLHAAKKF

SEQ ID NO: 2316 - protein, 20 aa, Artificial
  Short Peptide
FKKLFLKIPPPKFLHAAKKF

SEQ ID NO: 2317 - protein, 20 aa, Artificial
  Short Peptide
KWKLFLKIPPPKFLHAAKKF

SEQ ID NO: 2318 - protein, 20 aa, Artificial
  Short Peptide
RWKLFLKIPPPKFLHAAKKF

SEQ ID NO: 2319 - protein, 20 aa, Artificial
  Short Peptide
FWKLFLKIPPPKFLHAAKKF

SEQ ID NO: 2320 - protein, 20 aa, Artificial
  Short Peptide
KKKKFLKIPPPKFLHAAKKF

SEQ ID NO: 2321 - protein, 20 aa, Artificial
  Short Peptide
RKKKFLKIPPPKFLHAAKKF

SEQ ID NO: 2322 - protein, 20 aa, Artificial
  Short Peptide
FKKKFLKIPPPKFLHAAKKF

SEQ ID NO: 2323 - protein, 20 aa, Artificial
  Short Peptide
KWKKFLKIPPPKFLHAAKKF

SEQ ID NO: 2324 - protein, 20 aa, Artificial
  Short Peptide
RWKKFLKIPPPKFLHAAKKF

SEQ ID NO: 2325 - protein, 20 aa, Artificial
  Short Peptide
FWKKFLKIPPPKFLHAAKKF

SEQ ID NO: 2326 - protein, 20 aa, Artificial
  Short Peptide
KKKLLLKIPPPKFLHAAKKF

SEQ ID NO: 2327 - protein, 20 aa, Artificial
  Short Peptide
RKKLLLKIPPPKFLHAAKKF

SEQ ID NO: 2328 - protein, 20 aa, Artificial
  Short Peptide
FKKLLLKIPPPKFLHAAKKF

SEQ ID NO: 2329 - protein, 20 aa, Artificial
  Short Peptide
KWKLLLKIPPPKFLHAAKKF

SEQ ID NO: 2330 - protein, 20 aa, Artificial
  Short Peptide
RWKLLLKIPPPKFLHAAKKF

SEQ ID NO: 2331 - protein, 20 aa, Artificial
  Short Peptide
FWKLLLKIPPPKFLHAAKKF

SEQ ID NO: 2332 - protein, 20 aa, Artificial
  Short Peptide
KKKKLLKIPPPKFLHAAKKF

SEQ ID NO: 2333 - protein, 20 aa, Artificial
  Short Peptide
RKKKLLKIPPPKFLHAAKKF

SEQ ID NO: 2334 - protein, 20 aa, Artificial
  Short Peptide
FKKKLLKIPPPKFLHAAKKF

SEQ ID NO: 2335 - protein, 20 aa, Artificial
  Short Peptide
KWKKLLKIPPPKFLHAAKKF

SEQ ID NO: 2336 - protein, 20 aa, Artificial
  Short Peptide
RWKKLLKIPPPKFLHAAKKF

SEQ ID NO: 2337 - protein, 20 aa, Artificial
  Short Peptide
FWKKLLKIPPPKFLHAAKKF

SEQ ID NO: 2338 - protein, 20 aa, Artificial
  Short Peptide
KKKLFKKIPPPKFLHAAKKF

SEQ ID NO: 2339 - protein, 20 aa, Artificial
  Short Peptide
RKKLFKKIPPPKFLHAAKKF

SEQ ID NO: 2340 - protein, 20 aa, Artificial
  Short Peptide
FKKLFKKIPPPKFLHAAKKF

SEQ ID NO: 2341 - protein, 20 aa, Artificial
  Short Peptide
KWKLFKKIPPPKFLHAAKKF

SEQ ID NO: 2342 - protein, 20 aa, Artificial
  Short Peptide
RWKLFKKIPPPKFLHAAKKF

SEQ ID NO: 2343 - protein, 20 aa, Artificial
  Short Peptide
FWKLFKKIPPPKFLHAAKKF

SEQ ID NO: 2344 - protein, 20 aa, Artificial
  Short Peptide
KKKKFKKIPPPKFLHAAKKF

SEQ ID NO: 2345 - protein, 20 aa, Artificial
  Short Peptide
RKKKFKKIPPPKFLHAAKKF

SEQ ID NO: 2346 - protein, 20 aa, Artificial
  Short Peptide
FKKKFKKIPPPKFLHAAKKF

SEQ ID NO: 2347 - protein, 20 aa, Artificial
  Short Peptide
KWKKFKKIPPPKFLHAAKKF

SEQ ID NO: 2348 - protein, 20 aa, Artificial
  Short Peptide
RWKKFKKIPPPKFLHAAKKF

SEQ ID NO: 2349 - protein, 20 aa, Artificial
  Short Peptide
FWKKFKKIPPPKFLHAAKKF

SEQ ID NO: 2350 - protein, 20 aa, Artificial
  Short Peptide
KKKLLKKIPPPKFLHAAKKF

SEQ ID NO: 2351 - protein, 20 aa, Artificial
  Short Peptide
RKKLLKKIPPPKFLHAAKKF

SEQ ID NO: 2352 - protein, 20 aa, Artificial
  Short Peptide
FKKLLKKIPPPKFLHAAKKF

SEQ ID NO: 2353 - protein, 20 aa, Artificial
  Short Peptide
KWKLLKKIPPPKFLHAAKKF

SEQ ID NO: 2354 - protein, 20 aa, Artificial
  Short Peptide
RWKLLKKIPPPKFLHAAKKF

SEQ ID NO: 2355 - protein, 20 aa, Artificial
  Short Peptide
FWKLLKKIPPPKFLHAAKKF

SEQ ID NO: 2356 - protein, 20 aa, Artificial
  Short Peptide
KKKKLKKIPPPKFLHAAKKF

SEQ ID NO: 2357 - protein, 20 aa, Artificial
  Short Peptide
RKKKLKKIPPPKFLHAAKKF

SEQ ID NO: 2358 - protein, 20 aa, Artificial
  Short Peptide
FKKKLKKIPPPKFLHAAKKF

SEQ ID NO: 2359 - protein, 20 aa, Artificial
  Short Peptide
KWKKLKKIPPPKFLHAAKKF

SEQ ID NO: 2360 - protein, 20 aa, Artificial
  Short Peptide
RWKKLKKIPPPKFLHAAKKF

SEQ ID NO: 2361 - protein, 20 aa, Artificial
  Short Peptide
FWKKLKKIPPPKFLHAAKKF

SEQ ID NO: 2362 - protein, 19 aa, Artificial
  Short Peptide
KKKLFLKIPPKFLHAAKKF

SEQ ID NO: 2363 - protein, 19 aa, Artificial
  Short Peptide
RKKLFLKIPPKFLHAAKKF

SEQ ID NO: 2364 - protein, 19 aa, Artificial
  Short Peptide
FKKLFLKIPPKFLHAAKKF

SEQ ID NO: 2365 - protein, 19 aa, Artificial
  Short Peptide
KWKLFLKIPPKFLHAAKKF

SEQ ID NO: 2366 - protein, 19 aa, Artificial
  Short Peptide
RWKLFLKIPPKFLHAAKKF

SEQ ID NO: 2367 - protein, 19 aa, Artificial
  Short Peptide
FWKLFLKIPPKFLHAAKKF

SEQ ID NO: 2368 - protein, 19 aa, Artificial
  Short Peptide
KKKKFLKIPPKFLHAAKKF

SEQ ID NO: 2369 - protein, 19 aa, Artificial
  Short Peptide
RKKKFLKIPPKFLHAAKKF

SEQ ID NO: 2370 - protein, 19 aa, Artificial
  Short Peptide
FKKKFLKIPPKFLHAAKKF

SEQ ID NO: 2371 - protein, 19 aa, Artificial
  Short Peptide
KWKKFLKIPPKFLHAAKKF

SEQ ID NO: 2372 - protein, 19 aa, Artificial
  Short Peptide
RWKKFLKIPPKFLHAAKKF

SEQ ID NO: 2373 - protein, 19 aa, Artificial
  Short Peptide
FWKKFLKIPPKFLHAAKKF

SEQ ID NO: 2374 - protein, 19 aa, Artificial
  Short Peptide
KKKLLLKIPPKFLHAAKKF

SEQ ID NO: 2375 - protein, 19 aa, Artificial
  Short Peptide
RKKLLLKIPPKFLHAAKKF

SEQ ID NO: 2376 - protein, 19 aa, Artificial
  Short Peptide
FKKLLLKIPPKFLHAAKKF

SEQ ID NO: 2377 - protein, 19 aa, Artificial
  Short Peptide
KWKLLLKIPPKFLHAAKKF

SEQ ID NO: 2378 - protein, 19 aa, Artificial
  Short Peptide
RWKLLLKIPPKFLHAAKKF

SEQ ID NO: 2379 - protein, 19 aa, Artificial
  Short Peptide
FWKLLLKIPPKFLHAAKKF

SEQ ID NO: 2380 - protein, 19 aa, Artificial
  Short Peptide
KKKKLLKIPPKFLHAAKKF

SEQ ID NO: 2381 - protein, 19 aa, Artificial
  Short Peptide
RKKKLLKIPPKFLHAAKKF

SEQ ID NO: 2382 - protein, 19 aa, Artificial
  Short Peptide
FKKKLLKIPPKFLHAAKKF

SEQ ID NO: 2383 - protein, 19 aa, Artificial
  Short Peptide
KWKKLLKIPPKFLHAAKKF

SEQ ID NO: 2384 - protein, 19 aa, Artificial
  Short Peptide
RWKKLLKIPPKFLHAAKKF

SEQ ID NO: 2385 - protein, 19 aa, Artificial
  Short Peptide
FWKKLLKIPPKFLHAAKKF

SEQ ID NO: 2386 - protein, 19 aa, Artificial
  Short Peptide
KKKLFKKIPPKFLHAAKKF

SEQ ID NO: 2387 - protein, 19 aa, Artificial
  Short Peptide
RKKLFKKIPPKFLHAAKKF

SEQ ID NO: 2388 - protein, 19 aa, Artificial
  Short Peptide
FKKLFKKIPPKFLHAAKKF

SEQ ID NO: 2389 - protein, 19 aa, Artificial
  Short Peptide
KWKLFKKIPPKFLHAAKKF

SEQ ID NO: 2390 - protein, 19 aa, Artificial
  Short Peptide
RWKLFKKIPPKFLHAAKKF

SEQ ID NO: 2391 - protein, 19 aa, Artificial
  Short Peptide
FWKLFKKIPPKFLHAAKKF

SEQ ID NO: 2392 - protein, 19 aa, Artificial
  Short Peptide
KKKKFKKIPPKFLHAAKKF

SEQ ID NO: 2393 - protein, 19 aa, Artificial
  Short Peptide
RKKKFKKIPPKFLHAAKKF

SEQ ID NO: 2394 - protein, 19 aa, Artificial
  Short Peptide
FKKKFKKIPPKFLHAAKKF

SEQ ID NO: 2395 - protein, 19 aa, Artificial
  Short Peptide
KWKKFKKIPPKFLHAAKKF

SEQ ID NO: 2396 - protein, 19 aa, Artificial
  Short Peptide
RWKKFKKIPPKFLHAAKKF

SEQ ID NO: 2397 - protein, 19 aa, Artificial
  Short Peptide
FWKKFKKIPPKFLHAAKKF

SEQ ID NO: 2398 - protein, 19 aa, Artificial
  Short Peptide
KKKLLKKIPPKFLHAAKKF

SEQ ID NO: 2399 - protein, 19 aa, Artificial
  Short Peptide
RKKLLKKIPPKFLHAAKKF

SEQ ID NO: 2400 - protein, 19 aa, Artificial
  Short Peptide
FKKLLKKIPPKFLHAAKKF

SEQ ID NO: 2401 - protein, 19 aa, Artificial
  Short Peptide
KWKLLKKIPPKFLHAAKKF

SEQ ID NO: 2402 - protein, 19 aa, Artificial
  Short Peptide
RWKLLKKIPPKFLHAAKKF

SEQ ID NO: 2403 - protein, 19 aa, Artificial
  Short Peptide
FWKLLKKIPPKFLHAAKKF

SEQ ID NO: 2404 - protein, 19 aa, Artificial
  Short Peptide
KKKKLKKIPPKFLHAAKKF

SEQ ID NO: 2405 - protein, 19 aa, Artificial
  Short Peptide
RKKKLKKIPPKFLHAAKKF

SEQ ID NO: 2406 - protein, 19 aa, Artificial
  Short Peptide
FKKKLKKIPPKFLHAAKKF

SEQ ID NO: 2407 - protein, 19 aa, Artificial
  Short Peptide
KWKKLKKIPPKFLHAAKKF

SEQ ID NO: 2408 - protein, 19 aa, Artificial
  Short Peptide
RWKKLKKIPPKFLHAAKKF

SEQ ID NO: 2409 - protein, 19 aa, Artificial
  Short Peptide
FWKKLKKIPPKFLHAAKKF

SEQ ID NO: 2410 - protein, 18 aa, Artificial
  Short Peptide
KKKLFLKIPKFLHAAKKF

SEQ ID NO: 2411 - protein, 18 aa, Artificial
  Short Peptide
RKKLFLKIPKFLHAAKKF

SEQ ID NO: 2412 - protein, 18 aa, Artificial
  Short Peptide
FKKLFLKIPKFLHAAKKF

SEQ ID NO: 2413 - protein, 18 aa, Artificial
  Short Peptide
KWKLFLKIPKFLHAAKKF

SEQ ID NO: 2414 - protein, 18 aa, Artificial
  Short Peptide
RWKLFLKIPKFLHAAKKF

SEQ ID NO: 2415 - protein, 18 aa, Artificial
  Short Peptide
FWKLFLKIPKFLHAAKKF

SEQ ID NO: 2416 - protein, 18 aa, Artificial
  Short Peptide
KKKKFLKIPKFLHAAKKF

SEQ ID NO: 2417 - protein, 18 aa, Artificial
  Short Peptide
RKKKFLKIPKFLHAAKKF

SEQ ID NO: 2418 - protein, 18 aa, Artificial
  Short Peptide
FKKKFLKIPKFLHAAKKF

SEQ ID NO: 2419 - protein, 18 aa, Artificial
  Short Peptide
RWKKFLKIPKFLHAAKKF

SEQ ID NO: 2420 - protein, 18 aa, Artificial
  Short Peptide
FWKKFLKIPKFLHAAKKF

SEQ ID NO: 2421 - protein, 18 aa, Artificial
  Short Peptide
KKKLLLKIPKFLHAAKKF

SEQ ID NO: 2422 - protein, 18 aa, Artificial
  Short Peptide
RKKLLLKIPKFLHAAKKF

SEQ ID NO: 2423 - protein, 18 aa, Artificial
  Short Peptide
FKKLLLKIPKFLHAAKKF

SEQ ID NO: 2424 - protein, 18 aa, Artificial
  Short Peptide
KWKLLLKIPKFLHAAKKF

SEQ ID NO: 2425 - protein, 18 aa, Artificial
  Short Peptide
RWKLLLKIPKFLHAAKKF

SEQ ID NO: 2426 - protein, 18 aa, Artificial
  Short Peptide
FWKLLLKIPKFLHAAKKF

SEQ ID NO: 2427 - protein, 18 aa, Artificial
  Short Peptide
KKKKLLKIPKFLHAAKKF

SEQ ID NO: 2428 - protein, 18 aa, Artificial
  Short Peptide
RKKKLLKIPKFLHAAKKF

SEQ ID NO: 2429 - protein, 18 aa, Artificial
  Short Peptide
FKKKLLKIPKFLHAAKKF

SEQ ID NO: 2430 - protein, 18 aa, Artificial
  Short Peptide
RWKKLLKIPKFLHAAKKF

SEQ ID NO: 2431 - protein, 18 aa, Artificial
  Short Peptide
FWKKLLKIPKFLHAAKKF

SEQ ID NO: 2432 - protein, 18 aa, Artificial
  Short Peptide
KKKLFKKIPKFLHAAKKF

SEQ ID NO: 2433 - protein, 18 aa, Artificial
  Short Peptide
RKKLFKKIPKFLHAAKKF

SEQ ID NO: 2434 - protein, 18 aa, Artificial
  Short Peptide
RWKLFKKIPKFLHAAKKF

SEQ ID NO: 2435 - protein, 18 aa, Artificial
  Short Peptide
FWKLFKKIPKFLHAAKKF

SEQ ID NO: 2436 - protein, 18 aa, Artificial
  Short Peptide
KKKKFKKIPKFLHAAKKF

SEQ ID NO: 2437 - protein, 18 aa, Artificial
  Short Peptide
RKKKFKKIPKFLHAAKKF

SEQ ID NO: 2438 - protein, 18 aa, Artificial
  Short Peptide
FKKKFKKIPKFLHAAKKF

SEQ ID NO: 2439 - protein, 18 aa, Artificial
  Short Peptide
KWKKFKKIPKFLHAAKKF

SEQ ID NO: 2440 - protein, 18 aa, Artificial
  Short Peptide
RWKKFKKIPKFLHAAKKF

SEQ ID NO: 2441 - protein, 18 aa, Artificial
  Short Peptide
FWKKFKKIPKFLHAAKKF

SEQ ID NO: 2442 - protein, 18 aa, Artificial
  Short Peptide
KKKLLKKIPKFLHAAKKF

SEQ ID NO: 2443 - protein, 18 aa, Artificial
  Short Peptide
RKKLLKKIPKFLHAAKKF

SEQ ID NO: 2444 - protein, 18 aa, Artificial
  Short Peptide
FKKLLKKIPKFLHAAKKF

SEQ ID NO: 2445 - protein, 18 aa, Artificial
  Short Peptide
KWKLLKKIPKFLHAAKKF

SEQ ID NO: 2446 - protein, 18 aa, Artificial
  Short Peptide
RWKLLKKIPKFLHAAKKF

SEQ ID NO: 2447 - protein, 18 aa, Artificial
  Short Peptide
FWKLLKKIPKFLHAAKKF

SEQ ID NO: 2448 - protein, 18 aa, Artificial
  Short Peptide
KKKKLKKIPKFLHAAKKF

SEQ ID NO: 2449 - protein, 18 aa, Artificial
  Short Peptide
RKKKLKKIPKFLHAAKKF

SEQ ID NO: 2450 - protein, 18 aa, Artificial
  Short Peptide
FKKKLKKIPKFLHAAKKF

SEQ ID NO: 2451 - protein, 18 aa, Artificial
  Short Peptide
KWKKLKKIPKFLHAAKKF

SEQ ID NO: 2452 - protein, 18 aa, Artificial
  Short Peptide
RWKKLKKIPKFLHAAKKF

SEQ ID NO: 2453 - protein, 18 aa, Artificial
  Short Peptide
FWKKLKKIPKFLHAAKKF

SEQ ID NO: 2454 - protein, 20 aa, Artificial
  Short Peptide
KKKLFLKIPPPKFKHAAKKF

SEQ ID NO: 2455 - protein, 20 aa, Artificial
  Short Peptide
RKKLFLKIPPPKFKHAAKKF

SEQ ID NO: 2456 - protein, 20 aa, Artificial
  Short Peptide
FKKLFLKIPPPKFKHAAKKF

SEQ ID NO: 2457 - protein, 20 aa, Artificial
  Short Peptide
KWKLFLKIPPPKFKHAAKKF

SEQ ID NO: 2458 - protein, 20 aa, Artificial
  Short Peptide
RWKLFLKIPPPKFKHAAKKF

SEQ ID NO: 2459 - protein, 20 aa, Artificial
  Short Peptide
FWKLFLKIPPPKFKHAAKKF

SEQ ID NO: 2460 - protein, 20 aa, Artificial
  Short Peptide
KKKKFLKIPPPKFKHAAKKF

SEQ ID NO: 2461 - protein, 20 aa, Artificial
  Short Peptide
RKKKFLKIPPPKFKHAAKKF

SEQ ID NO: 2462 - protein, 20 aa, Artificial
  Short Peptide
FKKKFLKIPPPKFKHAAKKF

SEQ ID NO: 2463 - protein, 20 aa, Artificial
  Short Peptide
KWKKFLKIPPPKFKHAAKKF

SEQ ID NO: 2464 - protein, 20 aa, Artificial
  Short Peptide
RWKKFLKIPPPKFKHAAKKF

SEQ ID NO: 2465 - protein, 20 aa, Artificial
  Short Peptide
FWKKFLKIPPPKFKHAAKKF

SEQ ID NO: 2466 - protein, 20 aa, Artificial
  Short Peptide
KKKLLLKIPPPKFKHAAKKF

SEQ ID NO: 2467 - protein, 20 aa, Artificial
  Short Peptide
RKKLLLKIPPPKFKHAAKKF

SEQ ID NO: 2468 - protein, 20 aa, Artificial
  Short Peptide
FKKLLLKIPPPKFKHAAKKF

SEQ ID NO: 2469 - protein, 20 aa, Artificial
  Short Peptide
KWKLLLKIPPPKFKHAAKKF

SEQ ID NO: 2470 - protein, 20 aa, Artificial
  Short Peptide
RWKLLLKIPPPKFKHAAKKF

SEQ ID NO: 2471 - protein, 20 aa, Artificial
  Short Peptide
FWKLLLKIPPPKFKHAAKKF

SEQ ID NO: 2472 - protein, 20 aa, Artificial
  Short Peptide
KKKKLLKIPPPKFKHAAKKF

SEQ ID NO: 2473 - protein, 20 aa, Artificial
  Short Peptide
RKKKLLKIPPPKFKHAAKKF

SEQ ID NO: 2474 - protein, 20 aa, Artificial
  Short Peptide
FKKKLLKIPPPKFKHAAKKF

SEQ ID NO: 2475 - protein, 20 aa, Artificial
  Short Peptide
KWKKLLKIPPPKFKHAAKKF

SEQ ID NO: 2476 - protein, 20 aa, Artificial
  Short Peptide
RWKKLLKIPPPKFKHAAKKF

SEQ ID NO: 2477 - protein, 20 aa, Artificial
  Short Peptide
FWKKLLKIPPPKFKHAAKKF

SEQ ID NO: 2478 - protein, 20 aa, Artificial
  Short Peptide
KKKLFKKIPPPKFKHAAKKF

SEQ ID NO: 2479 - protein, 20 aa, Artificial
  Short Peptide
RKKLFKKIPPPKFKHAAKKF

SEQ ID NO: 2480 - protein, 20 aa, Artificial
  Short Peptide
FKKLFKKIPPPKFKHAAKKF

SEQ ID NO: 2481 - protein, 20 aa, Artificial
  Short Peptide
KWKLFKKIPPPKFKHAAKKF

SEQ ID NO: 2482 - protein, 20 aa, Artificial
  Short Peptide
RWKLFKKIPPPKFKHAAKKF

SEQ ID NO: 2483 - protein, 20 aa, Artificial
  Short Peptide
FWKLFKKIPPPKFKHAAKKF

SEQ ID NO: 2484 - protein, 20 aa, Artificial
  Short Peptide
KKKKFKKIPPPKFKHAAKKF

SEQ ID NO: 2485 - protein, 20 aa, Artificial
  Short Peptide
RKKKFKKIPPPKFKHAAKKF

SEQ ID NO: 2486 - protein, 20 aa, Artificial
  Short Peptide
FKKKFKKIPPPKFKHAAKKF

SEQ ID NO: 2487 - protein, 20 aa, Artificial
  Short Peptide
KWKKFKKIPPPKFKHAAKKF

SEQ ID NO: 2488 - protein, 20 aa, Artificial
  Short Peptide
RWKKFKKIPPPKFKHAAKKF

SEQ ID NO: 2489 - protein, 20 aa, Artificial
  Short Peptide
FWKKFKKIPPPKFKHAAKKF

SEQ ID NO: 2490 - protein, 20 aa, Artificial
  Short Peptide
KKKLLKKIPPPKFKHAAKKF

SEQ ID NO: 2491 - protein, 20 aa, Artificial
  Short Peptide
RKKLLKKIPPPKFKHAAKKF

SEQ ID NO: 2492 - protein, 20 aa, Artificial
  Short Peptide
FKKLLKKIPPPKFKHAAKKF

SEQ ID NO: 2493 - protein, 20 aa, Artificial
  Short Peptide
KWKLLKKIPPPKFKHAAKKF

SEQ ID NO: 2494 - protein, 20 aa, Artificial
  Short Peptide
RWKLLKKIPPPKFKHAAKKF

SEQ ID NO: 2495 - protein, 20 aa, Artificial
  Short Peptide
FWKLLKKIPPPKFKHAAKKF

SEQ ID NO: 2496 - protein, 20 aa, Artificial
  Short Peptide
KKKKLKKIPPPKFKHAAKKF

SEQ ID NO: 2497 - protein, 20 aa, Artificial
  Short Peptide
RKKKLKKIPPPKFKHAAKKF

SEQ ID NO: 2498 - protein, 20 aa, Artificial
  Short Peptide
FKKKLKKIPPPKFKHAAKKF

SEQ ID NO: 2499 - protein, 20 aa, Artificial
  Short Peptide
KWKKLKKIPPPKFKHAAKKF

SEQ ID NO: 2500 - protein, 20 aa, Artificial
  Short Peptide
RWKKLKKIPPPKFKHAAKKF

SEQ ID NO: 2501 - protein, 20 aa, Artificial
  Short Peptide
FWKKLKKIPPPKFKHAAKKF

SEQ ID NO: 2502 - protein, 19 aa, Artificial
  Short Peptide
KKKLFLKIPPKFKHAAKKF

SEQ ID NO: 2503 - protein, 19 aa, Artificial
  Short Peptide
RKKLFLKIPPKFKHAAKKF

SEQ ID NO: 2504 - protein, 19 aa, Artificial
  Short Peptide
FKKLFLKIPPKFKHAAKKF

SEQ ID NO: 2505 - protein, 19 aa, Artificial
  Short Peptide
KWKLFLKIPPKFKHAAKKF

SEQ ID NO: 2506 - protein, 19 aa, Artificial
  Short Peptide
RWKLFLKIPPKFKHAAKKF

SEQ ID NO: 2507 - protein, 19 aa, Artificial
  Short Peptide
FWKLFLKIPPKFKHAAKKF

SEQ ID NO: 2508 - protein, 19 aa, Artificial
  Short Peptide
KKKKFLKIPPKFKHAAKKF

SEQ ID NO: 2509 - protein, 19 aa, Artificial
  Short Peptide
RKKKFLKIPPKFKHAAKKF

SEQ ID NO: 2510 - protein, 19 aa, Artificial
  Short Peptide
FKKKFLKIPPKFKHAAKKF

SEQ ID NO: 2511 - protein, 19 aa, Artificial
  Short Peptide
KWKKFLKIPPKFKHAAKKF

SEQ ID NO: 2512 - protein, 19 aa, Artificial
  Short Peptide
RWKKFLKIPPKFKHAAKKF

SEQ ID NO: 2513 - protein, 19 aa, Artificial
  Short Peptide
FWKKFLKIPPKFKHAAKKF

SEQ ID NO: 2514 - protein, 19 aa, Artificial
  Short Peptide
KKKLLLKIPPKFKHAAKKF

SEQ ID NO: 2515 - protein, 19 aa, Artificial
  Short Peptide
RKKLLLKIPPKFKHAAKKF

SEQ ID NO: 2516 - protein, 19 aa, Artificial
  Short Peptide
FKKLLLKIPPKFKHAAKKF

SEQ ID NO: 2517 - protein, 19 aa, Artificial
  Short Peptide
KWKLLLKIPPKFKHAAKKF

SEQ ID NO: 2518 - protein, 19 aa, Artificial
  Short Peptide
RWKLLLKIPPKFKHAAKKF

SEQ ID NO: 2519 - protein, 19 aa, Artificial
  Short Peptide
FWKLLLKIPPKFKHAAKKF

SEQ ID NO: 2520 - protein, 19 aa, Artificial
  Short Peptide
KKKKLLKIPPKFKHAAKKF

SEQ ID NO: 2521 - protein, 19 aa, Artificial
  Short Peptide
RKKKLLKIPPKFKHAAKKF

SEQ ID NO: 2522 - protein, 19 aa, Artificial
  Short Peptide
FKKKLLKIPPKFKHAAKKF

SEQ ID NO: 2523 - protein, 19 aa, Artificial
  Short Peptide
KWKKLLKIPPKFKHAAKKF

SEQ ID NO: 2524 - protein, 19 aa, Artificial
  Short Peptide
RWKKLLKIPPKFKHAAKKF

SEQ ID NO: 2525 - protein, 19 aa, Artificial
  Short Peptide
FWKKLLKIPPKFKHAAKKF

SEQ ID NO: 2526 - protein, 19 aa, Artificial
  Short Peptide
KKKLFKKIPPKFKHAAKKF

SEQ ID NO: 2527 - protein, 19 aa, Artificial
  Short Peptide
RKKLFKKIPPKFKHAAKKF

SEQ ID NO: 2528 - protein, 19 aa, Artificial
  Short Peptide
FKKLFKKIPPKFKHAAKKF

SEQ ID NO: 2529 - protein, 19 aa, Artificial
  Short Peptide
KWKLFKKIPPKFKHAAKKF

SEQ ID NO: 2530 - protein, 19 aa, Artificial
  Short Peptide
RWKLFKKIPPKFKHAAKKF

SEQ ID NO: 2531 - protein, 19 aa, Artificial
  Short Peptide
FWKLFKKIPPKFKHAAKKF

SEQ ID NO: 2532 - protein, 19 aa, Artificial
  Short Peptide
KKKKFKKIPPKFKHAAKKF

SEQ ID NO: 2533 - protein, 19 aa, Artificial
  Short Peptide
RKKKFKKIPPKFKHAAKKF

SEQ ID NO: 2534 - protein, 19 aa, Artificial
  Short Peptide
FKKKFKKIPPKFKHAAKKF

SEQ ID NO: 2535 - protein, 19 aa, Artificial
  Short Peptide
KWKKFKKIPPKFKHAAKKF

SEQ ID NO: 2536 - protein, 19 aa, Artificial
  Short Peptide
RWKKFKKIPPKFKHAAKKF

SEQ ID NO: 2537 - protein, 19 aa, Artificial
  Short Peptide
FWKKFKKIPPKFKHAAKKF

SEQ ID NO: 2538 - protein, 19 aa, Artificial
  Short Peptide
KKKLLKKIPPKFKHAAKKF

SEQ ID NO: 2539 - protein, 19 aa, Artificial
  Short Peptide
RKKLLKKIPPKFKHAAKKF

SEQ ID NO: 2540 - protein, 19 aa, Artificial
  Short Peptide
FKKLLKKIPPKFKHAAKKF

SEQ ID NO: 2541 - protein, 19 aa, Artificial
  Short Peptide
KWKLLKKIPPKFKHAAKKF

SEQ ID NO: 2542 - protein, 19 aa, Artificial
  Short Peptide
RWKLLKKIPPKFKHAAKKF

SEQ ID NO: 2543 - protein, 19 aa, Artificial
  Short Peptide
FWKLLKKIPPKFKHAAKKF

SEQ ID NO: 2544 - protein, 19 aa, Artificial
  Short Peptide
KKKKLKKIPPKFKHAAKKF

SEQ ID NO: 2545 - protein, 19 aa, Artificial
  Short Peptide
RKKKLKKIPPKFKHAAKKF

SEQ ID NO: 2546 - protein, 19 aa, Artificial
  Short Peptide
FKKKLKKIPPKFKHAAKKF

SEQ ID NO: 2547 - protein, 19 aa, Artificial
  Short Peptide
KWKKLKKIPPKFKHAAKKF

SEQ ID NO: 2548 - protein, 19 aa, Artificial
  Short Peptide
RWKKLKKIPPKFKHAAKKF

SEQ ID NO: 2549 - protein, 19 aa, Artificial
  Short Peptide
FWKKLKKIPPKFKHAAKKF

SEQ ID NO: 2550 - protein, 18 aa, Artificial
  Short Peptide
KKKLFLKIPKFKHAAKKF

SEQ ID NO: 2551 - protein, 18 aa, Artificial
  Short Peptide
RKKLFLKIPKFKHAAKKF

SEQ ID NO: 2552 - protein, 18 aa, Artificial
  Short Peptide
FKKLFLKIPKFKHAAKKF

SEQ ID NO: 2553 - protein, 18 aa, Artificial
  Short Peptide
KWKLFLKIPKFKHAAKKF

SEQ ID NO: 2554 - protein, 18 aa, Artificial
  Short Peptide
RWKLFLKIPKFKHAAKKF

SEQ ID NO: 2555 - protein, 18 aa, Artificial
  Short Peptide
FWKLFLKIPKFKHAAKKF

SEQ ID NO: 2556 - protein, 18 aa, Artificial
  Short Peptide
KKKKFLKIPKFKHAAKKF

SEQ ID NO: 2557 - protein, 18 aa, Artificial
  Short Peptide
RKKKFLKIPKFKHAAKKF

SEQ ID NO: 2558 - protein, 18 aa, Artificial
  Short Peptide
FKKKFLKIPKFKHAAKKF

SEQ ID NO: 2559 - protein, 18 aa, Artificial
  Short Peptide
KWKKFLKIPKFKHAAKKF

SEQ ID NO: 2560 - protein, 18 aa, Artificial
  Short Peptide
RWKKFLKIPKFKHAAKKF

SEQ ID NO: 2561 - protein, 18 aa, Artificial
  Short Peptide
FWKKFLKIPKFKHAAKKF

SEQ ID NO: 2562 - protein, 18 aa, Artificial
  Short Peptide
KKKLLLKIPKFKHAAKKF

SEQ ID NO: 2563 - protein, 18 aa, Artificial
  Short Peptide
RKKLLLKIPKFKHAAKKF

SEQ ID NO: 2564 - protein, 18 aa, Artificial
  Short Peptide
FKKLLLKIPKFKHAAKKF

SEQ ID NO: 2565 - protein, 18 aa, Artificial
  Short Peptide
KWKLLLKIPKFKHAAKKF

SEQ ID NO: 2566 - protein, 18 aa, Artificial
  Short Peptide
RWKLLLKIPKFKHAAKKF

SEQ ID NO: 2567 - protein, 18 aa, Artificial
  Short Peptide
FWKLLLKIPKFKHAAKKF

SEQ ID NO: 2568 - protein, 18 aa, Artificial
  Short Peptide
KKKKLLKIPKFKHAAKKF

SEQ ID NO: 2569 - protein, 18 aa, Artificial
  Short Peptide
RKKKLLKIPKFKHAAKKF

SEQ ID NO: 2570 - protein, 18 aa, Artificial
  Short Peptide
FKKKLLKIPKFKHAAKKF

SEQ ID NO: 2571 - protein, 18 aa, Artificial
  Short Peptide
KWKKLLKIPKFKHAAKKF

SEQ ID NO: 2572 - protein, 18 aa, Artificial
  Short Peptide
RWKKLLKIPKFKHAAKKF

SEQ ID NO: 2573 - protein, 18 aa, Artificial
  Short Peptide
FWKKLLKIPKFKHAAKKF

SEQ ID NO: 2574 - protein, 18 aa, Artificial
  Short Peptide
KKKLFKKIPKFKHAAKKF

SEQ ID NO: 2575 - protein, 18 aa, Artificial
  Short Peptide
RKKLFKKIPKFKHAAKKF

SEQ ID NO: 2576 - protein, 18 aa, Artificial
  Short Peptide
FKKLFKKIPKFKHAAKKF

SEQ ID NO: 2577 - protein, 18 aa, Artificial
  Short Peptide
KWKLFKKIPKFKHAAKKF

SEQ ID NO: 2578 - protein, 18 aa, Artificial
  Short Peptide
RWKLFKKIPKFKHAAKKF

SEQ ID NO: 2579 - protein, 18 aa, Artificial
  Short Peptide
FWKLFKKIPKFKHAAKKF

SEQ ID NO: 2580 - protein, 18 aa, Artificial
  Short Peptide
KKKKFKKIPKFKHAAKKF

SEQ ID NO: 2581 - protein, 18 aa, Artificial
  Short Peptide
RKKKFKKIPKFKHAAKKF

SEQ ID NO: 2582 - protein, 18 aa, Artificial
  Short Peptide
FKKKFKKIPKFKHAAKKF

SEQ ID NO: 2583 - protein, 18 aa, Artificial
  Short Peptide
KWKKFKKIPKFKHAAKKF

SEQ ID NO: 2584 - protein, 18 aa, Artificial
  Short Peptide
RWKKFKKIPKFKHAAKKF

SEQ ID NO: 2585 - protein, 18 aa, Artificial
  Short Peptide
FWKKFKKIPKFKHAAKKF

SEQ ID NO: 2586 - protein, 18 aa, Artificial
  Short Peptide
KKKLLKKIPKFKHAAKKF

SEQ ID NO: 2587 - protein, 18 aa, Artificial
  Short Peptide
RKKLLKKIPKFKHAAKKF

SEQ ID NO: 2588 - protein, 18 aa, Artificial
  Short Peptide
FKKLLKKIPKFKHAAKKF

SEQ ID NO: 2589 - protein, 18 aa, Artificial
  Short Peptide
KWKLLKKIPKFKHAAKKF

SEQ ID NO: 2590 - protein, 18 aa, Artificial
  Short Peptide
RWKLLKKIPKFKHAAKKF

SEQ ID NO: 2591 - protein, 18 aa, Artificial
  Short Peptide
FWKLLKKIPKFKHAAKKF

SEQ ID NO: 2592 - protein, 18 aa, Artificial
  Short Peptide
KKKKLKKIPKFKHAAKKF

SEQ ID NO: 2593 - protein, 18 aa, Artificial
  Short Peptide
RKKKLKKIPKFKHAAKKF

SEQ ID NO: 2594 - protein, 18 aa, Artificial
  Short Peptide
FKKKLKKIPKFKHAAKKF

SEQ ID NO: 2595 - protein, 18 aa, Artificial
  Short Peptide
KWKKLKKIPKFKHAAKKF

SEQ ID NO: 2596 - protein, 18 aa, Artificial
  Short Peptide
RWKKLKKIPKFKHAAKKF

SEQ ID NO: 2597 - protein, 18 aa, Artificial
  Short Peptide
FWKKLKKIPKFKHAAKKF

SEQ ID NO: 2598 - protein, 20 aa, Artificial
  Short Peptide
KKKLFLKIPPPKFLKAAKKF

SEQ ID NO: 2599 - protein, 20 aa, Artificial
  Short Peptide
RKKLFLKIPPPKFLKAAKKF

SEQ ID NO: 2600 - protein, 20 aa, Artificial
  Short Peptide
FKKLFLKIPPPKFLKAAKKF

SEQ ID NO: 2601 - protein, 20 aa, Artificial
  Short Peptide
KWKLFLKIPPPKFLKAAKKF

SEQ ID NO: 2602 - protein, 20 aa, Artificial
  Short Peptide
RWKLFLKIPPPKFLKAAKKF

SEQ ID NO: 2603 - protein, 20 aa, Artificial
  Short Peptide
FWKLFLKIPPPKFLKAAKKF

SEQ ID NO: 2604 - protein, 20 aa, Artificial
  Short Peptide
KKKKFLKIPPPKFLKAAKKF

SEQ ID NO: 2605 - protein, 20 aa, Artificial
  Short Peptide
RKKKFLKIPPPKFLKAAKKF

SEQ ID NO: 2606 - protein, 20 aa, Artificial
  Short Peptide
FKKKFLKIPPPKFLKAAKKF

SEQ ID NO: 2607 - protein, 20 aa, Artificial
  Short Peptide
KWKKFLKIPPPKFLKAAKKF

SEQ ID NO: 2608 - protein, 20 aa, Artificial
  Short Peptide
RWKKFLKIPPPKFLKAAKKF

SEQ ID NO: 2609 - protein, 20 aa, Artificial
  Short Peptide
FWKKFLKIPPPKFLKAAKKF

SEQ ID NO: 2610 - protein, 20 aa, Artificial
  Short Peptide
KKKLLLKIPPPKFLKAAKKF

SEQ ID NO: 2611 - protein, 20 aa, Artificial
  Short Peptide
RKKLLLKIPPPKFLKAAKKF

SEQ ID NO: 2612 - protein, 20 aa, Artificial
  Short Peptide
FKKLLLKIPPPKFLKAAKKF

SEQ ID NO: 2613 - protein, 20 aa, Artificial
  Short Peptide
KWKLLLKIPPPKFLKAAKKF

SEQ ID NO: 2614 - protein, 20 aa, Artificial
  Short Peptide
RWKLLLKIPPPKFLKAAKKF

SEQ ID NO: 2615 - protein, 20 aa, Artificial
  Short Peptide
FWKLLLKIPPPKFLKAAKKF

SEQ ID NO: 2616 - protein, 20 aa, Artificial
  Short Peptide
KKKKLLKIPPPKFLKAAKKF

SEQ ID NO: 2617 - protein, 20 aa, Artificial
  Short Peptide
RKKKLLKIPPPKFLKAAKKF

SEQ ID NO: 2618 - protein, 20 aa, Artificial
  Short Peptide
FKKKLLKIPPPKFLKAAKKF

SEQ ID NO: 2619 - protein, 20 aa, Artificial
  Short Peptide
KWKKLLKIPPPKFLKAAKKF

SEQ ID NO: 2620 - protein, 20 aa, Artificial
  Short Peptide
RWKKLLKIPPPKFLKAAKKF

SEQ ID NO: 2621 - protein, 20 aa, Artificial
  Short Peptide
FWKKLLKIPPPKFLKAAKKF

SEQ ID NO: 2622 - protein, 20 aa, Artificial
  Short Peptide
KKKLFKKIPPPKFLKAAKKF

SEQ ID NO: 2623 - protein, 20 aa, Artificial
  Short Peptide
RKKLFKKIPPPKFLKAAKKF

SEQ ID NO: 2624 - protein, 20 aa, Artificial
  Short Peptide
FKKLFKKIPPPKFLKAAKKF

SEQ ID NO: 2625 - protein, 20 aa, Artificial
  Short Peptide
KWKLFKKIPPPKFLKAAKKF

SEQ ID NO: 2626 - protein, 20 aa, Artificial
  Short Peptide
RWKLFKKIPPPKFLKAAKKF

SEQ ID NO: 2627 - protein, 20 aa, Artificial
  Short Peptide
FWKLFKKIPPPKFLKAAKKF

SEQ ID NO: 2628 - protein, 20 aa, Artificial
  Short Peptide
KKKKFKKIPPPKFLKAAKKF

SEQ ID NO: 2629 - protein, 20 aa, Artificial
  Short Peptide
RKKKFKKIPPPKFLKAAKKF

SEQ ID NO: 2630 - protein, 20 aa, Artificial
  Short Peptide
FKKKFKKIPPPKFLKAAKKF

SEQ ID NO: 2631 - protein, 20 aa, Artificial
  Short Peptide
KWKKFKKIPPPKFLKAAKKF

SEQ ID NO: 2632 - protein, 20 aa, Artificial
  Short Peptide
RWKKFKKIPPPKFLKAAKKF

SEQ ID NO: 2633 - protein, 20 aa, Artificial
  Short Peptide
FWKKFKKIPPPKFLKAAKKF

SEQ ID NO: 2634 - protein, 20 aa, Artificial
  Short Peptide
KKKLLKKIPPPKFLKAAKKF

SEQ ID NO: 2635 - protein, 20 aa, Artificial
  Short Peptide
RKKLLKKIPPPKFLKAAKKF

SEQ ID NO: 2636 - protein, 20 aa, Artificial
  Short Peptide
FKKLLKKIPPPKFLKAAKKF

SEQ ID NO: 2637 - protein, 20 aa, Artificial
  Short Peptide
KWKLLKKIPPPKFLKAAKKF

SEQ ID NO: 2638 - protein, 20 aa, Artificial
  Short Peptide
RWKLLKKIPPPKFLKAAKKF

SEQ ID NO: 2639 - protein, 20 aa, Artificial
  Short Peptide
FWKLLKKIPPPKFLKAAKKF

SEQ ID NO: 2640 - protein, 20 aa, Artificial
  Short Peptide
KKKKLKKIPPPKFLKAAKKF

SEQ ID NO: 2641 - protein, 20 aa, Artificial
  Short Peptide
RKKKLKKIPPPKFLKAAKKF

SEQ ID NO: 2642 - protein, 20 aa, Artificial
  Short Peptide
FKKKLKKIPPPKFLKAAKKF

SEQ ID NO: 2643 - protein, 20 aa, Artificial
  Short Peptide
KWKKLKKIPPPKFLKAAKKF

SEQ ID NO: 2644 - protein, 20 aa, Artificial
  Short Peptide
RWKKLKKIPPPKFLKAAKKF

SEQ ID NO: 2645 - protein, 20 aa, Artificial
  Short Peptide
FWKKLKKIPPPKFLKAAKKF

SEQ ID NO: 2646 - protein, 19 aa, Artificial
  Short Peptide
KKKLFLKIPPKFLKAAKKF

SEQ ID NO: 2647 - protein, 19 aa, Artificial
  Short Peptide
RKKLFLKIPPKFLKAAKKF

SEQ ID NO: 2648 - protein, 19 aa, Artificial
  Short Peptide
FKKLFLKIPPKFLKAAKKF

SEQ ID NO: 2649 - protein, 19 aa, Artificial
  Short Peptide
KWKLFLKIPPKFLKAAKKF

SEQ ID NO: 2650 - protein, 19 aa, Artificial
  Short Peptide
RWKLFLKIPPKFLKAAKKF

SEQ ID NO: 2651 - protein, 19 aa, Artificial
  Short Peptide
FWKLFLKIPPKFLKAAKKF

SEQ ID NO: 2652 - protein, 19 aa, Artificial
  Short Peptide
KKKKFLKIPPKFLKAAKKF

SEQ ID NO: 2653 - protein, 19 aa, Artificial
  Short Peptide
RKKKFLKIPPKFLKAAKKF

SEQ ID NO: 2654 - protein, 19 aa, Artificial
  Short Peptide
FKKKFLKIPPKFLKAAKKF

SEQ ID NO: 2655 - protein, 19 aa, Artificial
  Short Peptide
KWKKFLKIPPKFLKAAKKF

SEQ ID NO: 2656 - protein, 19 aa, Artificial
  Short Peptide
RWKKFLKIPPKFLKAAKKF

SEQ ID NO: 2657 - protein, 19 aa, Artificial
  Short Peptide
FWKKFLKIPPKFLKAAKKF

SEQ ID NO: 2658 - protein, 19 aa, Artificial
  Short Peptide
KKKLLLKIPPKFLKAAKKF

SEQ ID NO: 2659 - protein, 19 aa, Artificial
  Short Peptide
RKKLLLKIPPKFLKAAKKF

SEQ ID NO: 2660 - protein, 19 aa, Artificial
  Short Peptide
FKKLLLKIPPKFLKAAKKF

SEQ ID NO: 2661 - protein, 19 aa, Artificial
  Short Peptide
KWKLLLKIPPKFLKAAKKF

SEQ ID NO: 2662 - protein, 19 aa, Artificial
  Short Peptide
RWKLLLKIPPKFLKAAKKF

SEQ ID NO: 2663 - protein, 19 aa, Artificial
  Short Peptide
FWKLLLKIPPKFLKAAKKF

SEQ ID NO: 2664 - protein, 19 aa, Artificial
  Short Peptide
KKKKLLKIPPKFLKAAKKF

SEQ ID NO: 2665 - protein, 19 aa, Artificial
  Short Peptide
RKKKLLKIPPKFLKAAKKF

SEQ ID NO: 2666 - protein, 19 aa, Artificial
  Short Peptide
FKKKLLKIPPKFLKAAKKF

SEQ ID NO: 2667 - protein, 19 aa, Artificial
  Short Peptide
KWKKLLKIPPKFLKAAKKF

SEQ ID NO: 2668 - protein, 19 aa, Artificial
  Short Peptide
RWKKLLKIPPKFLKAAKKF

SEQ ID NO: 2669 - protein, 19 aa, Artificial
  Short Peptide
FWKKLLKIPPKFLKAAKKF

SEQ ID NO: 2670 - protein, 19 aa, Artificial
  Short Peptide
KKKLFKKIPPKFLKAAKKF

SEQ ID NO: 2671 - protein, 19 aa, Artificial
  Short Peptide
RKKLFKKIPPKFLKAAKKF

SEQ ID NO: 2672 - protein, 19 aa, Artificial
  Short Peptide
FKKLFKKIPPKFLKAAKKF

SEQ ID NO: 2673 - protein, 19 aa, Artificial
  Short Peptide
KWKLFKKIPPKFLKAAKKF

SEQ ID NO: 2674 - protein, 19 aa, Artificial
  Short Peptide
RWKLFKKIPPKFLKAAKKF

SEQ ID NO: 2675 - protein, 19 aa, Artificial
  Short Peptide
FWKLFKKIPPKFLKAAKKF

SEQ ID NO: 2676 - protein, 19 aa, Artificial
  Short Peptide
KKKKFKKIPPKFLKAAKKF

SEQ ID NO: 2677 - protein, 19 aa, Artificial
  Short Peptide
RKKKFKKIPPKFLKAAKKF

SEQ ID NO: 2678 - protein, 19 aa, Artificial
  Short Peptide
FKKKFKKIPPKFLKAAKKF

SEQ ID NO: 2679 - protein, 19 aa, Artificial
  Short Peptide
KWKKFKKIPPKFLKAAKKF

SEQ ID NO: 2680 - protein, 19 aa, Artificial
  Short Peptide
RWKKFKKIPPKFLKAAKKF

SEQ ID NO: 2681 - protein, 19 aa, Artificial
  Short Peptide
FWKKFKKIPPKFLKAAKKF

SEQ ID NO: 2682 - protein, 19 aa, Artificial
  Short Peptide
KKKLLKKIPPKFLKAAKKF

SEQ ID NO: 2683 - protein, 19 aa, Artificial
  Short Peptide
RKKLLKKIPPKFLKAAKKF

SEQ ID NO: 2684 - protein, 19 aa, Artificial
  Short Peptide
FKKLLKKIPPKFLKAAKKF

SEQ ID NO: 2685 - protein, 19 aa, Artificial
  Short Peptide
KWKLLKKIPPKFLKAAKKF

SEQ ID NO: 2686 - protein, 19 aa, Artificial
  Short Peptide
RWKLLKKIPPKFLKAAKKF

SEQ ID NO: 2687 - protein, 19 aa, Artificial
  Short Peptide
FWKLLKKIPPKFLKAAKKF

SEQ ID NO: 2688 - protein, 19 aa, Artificial
  Short Peptide
KKKKLKKIPPKFLKAAKKF

SEQ ID NO: 2689 - protein, 19 aa, Artificial
  Short Peptide
RKKKLKKIPPKFLKAAKKF

SEQ ID NO: 2690 - protein, 19 aa, Artificial
  Short Peptide
FKKKLKKIPPKFLKAAKKF

SEQ ID NO: 2691 - protein, 19 aa, Artificial
  Short Peptide
KWKKLKKIPPKFLKAAKKF

SEQ ID NO: 2692 - protein, 19 aa, Artificial
  Short Peptide
RWKKLKKIPPKFLKAAKKF

SEQ ID NO: 2693 - protein, 19 aa, Artificial
  Short Peptide
FWKKLKKIPPKFLKAAKKF

SEQ ID NO: 2694 - protein, 18 aa, Artificial
  Short Peptide
KKKLFLKIPKFLKAAKKF

SEQ ID NO: 2695 - protein, 18 aa, Artificial
  Short Peptide
RKKLFLKIPKFLKAAKKF

SEQ ID NO: 2696 - protein, 18 aa, Artificial
  Short Peptide
FKKLFLKIPKFLKAAKKF

SEQ ID NO: 2697 - protein, 18 aa, Artificial
  Short Peptide
KWKLFLKIPKFLKAAKKF

SEQ ID NO: 2698 - protein, 18 aa, Artificial
  Short Peptide
RWKLFLKIPKFLKAAKKF

SEQ ID NO: 2699 - protein, 18 aa, Artificial
  Short Peptide
FWKLFLKIPKFLKAAKKF

SEQ ID NO: 2700 - protein, 18 aa, Artificial
  Short Peptide
KKKKFLKIPKFLKAAKKF

SEQ ID NO: 2701 - protein, 18 aa, Artificial
  Short Peptide
RKKKFLKIPKFLKAAKKF

SEQ ID NO: 2702 - protein, 18 aa, Artificial
  Short Peptide
FKKKFLKIPKFLKAAKKF

SEQ ID NO: 2703 - protein, 18 aa, Artificial
  Short Peptide
KWKKFLKIPKFLKAAKKF

SEQ ID NO: 2704 - protein, 18 aa, Artificial
  Short Peptide
RWKKFLKIPKFLKAAKKF

SEQ ID NO: 2705 - protein, 18 aa, Artificial
  Short Peptide
FWKKFLKIPKFLKAAKKF

SEQ ID NO: 2706 - protein, 18 aa, Artificial
  Short Peptide
KKKLLLKIPKFLKAAKKF

SEQ ID NO: 2707 - protein, 18 aa, Artificial
  Short Peptide
RKKLLLKIPKFLKAAKKF

SEQ ID NO: 2708 - protein, 18 aa, Artificial
  Short Peptide
FKKLLLKIPKFLKAAKKF

SEQ ID NO: 2709 - protein, 18 aa, Artificial
  Short Peptide
KWKLLLKIPKFLKAAKKF

SEQ ID NO: 2710 - protein, 18 aa, Artificial
  Short Peptide
RWKLLLKIPKFLKAAKKF

SEQ ID NO: 2711 - protein, 18 aa, Artificial
  Short Peptide
FWKLLLKIPKFLKAAKKF

SEQ ID NO: 2712 - protein, 18 aa, Artificial
  Short Peptide
KKKKLLKIPKFLKAAKKF

SEQ ID NO: 2713 - protein, 18 aa, Artificial
  Short Peptide
RKKKLLKIPKFLKAAKKF

SEQ ID NO: 2714 - protein, 18 aa, Artificial
  Short Peptide
FKKKLLKIPKFLKAAKKF

SEQ ID NO: 2715 - protein, 18 aa, Artificial
  Short Peptide
KWKKLLKIPKFLKAAKKF

SEQ ID NO: 2716 - protein, 18 aa, Artificial
  Short Peptide
RWKKLLKIPKFLKAAKKF

SEQ ID NO: 2717 - protein, 18 aa, Artificial
  Short Peptide
FWKKLLKIPKFLKAAKKF

SEQ ID NO: 2718 - protein, 18 aa, Artificial
  Short Peptide
KKKLFKKIPKFLKAAKKF

SEQ ID NO: 2719 - protein, 18 aa, Artificial
  Short Peptide
RKKLFKKIPKFLKAAKKF

SEQ ID NO: 2720 - protein, 18 aa, Artificial
  Short Peptide
FKKLFKKIPKFLKAAKKF

SEQ ID NO: 2721 - protein, 18 aa, Artificial
  Short Peptide
KWKLFKKIPKFLKAAKKF

SEQ ID NO: 2722 - protein, 18 aa, Artificial
  Short Peptide
RWKLFKKIPKFLKAAKKF

SEQ ID NO: 2723 - protein, 18 aa, Artificial
  Short Peptide
FWKLFKKIPKFLKAAKKF

SEQ ID NO: 2724 - protein, 18 aa, Artificial
  Short Peptide
KKKKFKKIPKFLKAAKKF

SEQ ID NO: 2725 - protein, 18 aa, Artificial
  Short Peptide
RKKKFKKIPKFLKAAKKF

SEQ ID NO: 2726 - protein, 18 aa, Artificial
  Short Peptide
FKKKFKKIPKFLKAAKKF

SEQ ID NO: 2727 - protein, 18 aa, Artificial
  Short Peptide
KWKKFKKIPKFLKAAKKF

SEQ ID NO: 2728 - protein, 18 aa, Artificial
  Short Peptide
RWKKFKKIPKFLKAAKKF

SEQ ID NO: 2729 - protein, 18 aa, Artificial
  Short Peptide
FWKKFKKIPKFLKAAKKF

SEQ ID NO: 2730 - protein, 18 aa, Artificial
  Short Peptide
KKKLLKKIPKFLKAAKKF

SEQ ID NO: 2731 - protein, 18 aa, Artificial
  Short Peptide
RKKLLKKIPKFLKAAKKF

SEQ ID NO: 2732 - protein, 18 aa, Artificial
  Short Peptide
FKKLLKKIPKFLKAAKKF

SEQ ID NO: 2733 - protein, 18 aa, Artificial
  Short Peptide
KWKLLKKIPKFLKAAKKF

SEQ ID NO: 2734 - protein, 18 aa, Artificial
  Short Peptide
RWKLLKKIPKFLKAAKKF

SEQ ID NO: 2735 - protein, 18 aa, Artificial
  Short Peptide
FWKLLKKIPKFLKAAKKF

SEQ ID NO: 2736 - protein, 18 aa, Artificial
  Short Peptide
KKKKLKKIPKFLKAAKKF

SEQ ID NO: 2737 - protein, 18 aa, Artificial
  Short Peptide
RKKKLKKIPKFLKAAKKF

SEQ ID NO: 2738 - protein, 18 aa, Artificial
  Short Peptide
FKKKLKKIPKFLKAAKKF

SEQ ID NO: 2739 - protein, 18 aa, Artificial
  Short Peptide
KWKKLKKIPKFLKAAKKF

SEQ ID NO: 2740 - protein, 18 aa, Artificial
  Short Peptide
RWKKLKKIPKFLKAAKKF

SEQ ID NO: 2741 - protein, 18 aa, Artificial
  Short Peptide
FWKKLKKIPKFLKAAKKF

SEQ ID NO: 2742 - protein, 20 aa, Artificial
  Short Peptide
KKKLFLKIPPPKFKKAAKKF

SEQ ID NO: 2743 - protein, 20 aa, Artificial
  Short Peptide
RKKLFLKIPPPKFKKAAKKF

SEQ ID NO: 2744 - protein, 20 aa, Artificial
  Short Peptide
FKKLFLKIPPPKFKKAAKKF

SEQ ID NO: 2745 - protein, 20 aa, Artificial
  Short Peptide
KWKLFLKIPPPKFKKAAKKF

SEQ ID NO: 2746 - protein, 20 aa, Artificial
  Short Peptide
RWKLFLKIPPPKFKKAAKKF

SEQ ID NO: 2747 - protein, 20 aa, Artificial
  Short Peptide
FWKLFLKIPPPKFKKAAKKF

SEQ ID NO: 2748 - protein, 20 aa, Artificial
  Short Peptide
KKKKFLKIPPPKFKKAAKKF

SEQ ID NO: 2749 - protein, 20 aa, Artificial
  Short Peptide
RKKKFLKIPPPKFKKAAKKF

SEQ ID NO: 2750 - protein, 20 aa, Artificial
  Short Peptide
FKKKFLKIPPPKFKKAAKKF

SEQ ID NO: 2751 - protein, 20 aa, Artificial
  Short Peptide
KWKKFLKIPPPKFKKAAKKF

SEQ ID NO: 2752 - protein, 20 aa, Artificial
  Short Peptide
RWKKFLKIPPPKFKKAAKKF

SEQ ID NO: 2753 - protein, 20 aa, Artificial
  Short Peptide
FWKKFLKIPPPKFKKAAKKF

SEQ ID NO: 2754 - protein, 20 aa, Artificial
  Short Peptide
KKKLLLKIPPPKFKKAAKKF

SEQ ID NO: 2755 - protein, 20 aa, Artificial
  Short Peptide
RKKLLLKIPPPKFKKAAKKF

SEQ ID NO: 2756 - protein, 20 aa, Artificial
  Short Peptide
FKKLLLKIPPPKFKKAAKKF

SEQ ID NO: 2757 - protein, 20 aa, Artificial
  Short Peptide
KWKLLLKIPPPKFKKAAKKF

SEQ ID NO: 2758 - protein, 20 aa, Artificial
  Short Peptide
RWKLLLKIPPPKFKKAAKKF

SEQ ID NO: 2759 - protein, 20 aa, Artificial
  Short Peptide
FWKLLLKIPPPKFKKAAKKF

SEQ ID NO: 2760 - protein, 20 aa, Artificial
  Short Peptide
KKKKLLKIPPPKFKKAAKKF

SEQ ID NO: 2761 - protein, 20 aa, Artificial
  Short Peptide
RKKKLLKIPPPKFKKAAKKF

SEQ ID NO: 2762 - protein, 20 aa, Artificial
  Short Peptide
FKKKLLKIPPPKFKKAAKKF

SEQ ID NO: 2763 - protein, 20 aa, Artificial
  Short Peptide
KWKKLLKIPPPKFKKAAKKF

SEQ ID NO: 2764 - protein, 20 aa, Artificial
  Short Peptide
RWKKLLKIPPPKFKKAAKKF

SEQ ID NO: 2765 - protein, 20 aa, Artificial
  Short Peptide
FWKKLLKIPPPKFKKAAKKF

SEQ ID NO: 2766 - protein, 20 aa, Artificial
  Short Peptide
KKKLFKKIPPPKFKKAAKKF

SEQ ID NO: 2767 - protein, 20 aa, Artificial
  Short Peptide
RKKLFKKIPPPKFKKAAKKF

SEQ ID NO: 2768 - protein, 20 aa, Artificial
  Short Peptide
FKKLFKKIPPPKFKKAAKKF

SEQ ID NO: 2769 - protein, 20 aa, Artificial
  Short Peptide
KWKLFKKIPPPKFKKAAKKF

SEQ ID NO: 2770 - protein, 20 aa, Artificial
  Short Peptide
RWKLFKKIPPPKFKKAAKKF

SEQ ID NO: 2771 - protein, 20 aa, Artificial
  Short Peptide
FWKLFKKIPPPKFKKAAKKF

SEQ ID NO: 2772 - protein, 20 aa, Artificial
  Short Peptide
KKKKFKKIPPPKFKKAAKKF

SEQ ID NO: 2773 - protein, 20 aa, Artificial
  Short Peptide
RKKKFKKIPPPKFKKAAKKF

SEQ ID NO: 2774 - protein, 20 aa, Artificial
  Short Peptide
FKKKFKKIPPPKFKKAAKKF

SEQ ID NO: 2775 - protein, 20 aa, Artificial
  Short Peptide
KWKKFKKIPPPKFKKAAKKF

SEQ ID NO: 2776 - protein, 20 aa, Artificial
  Short Peptide
RWKKFKKIPPPKFKKAAKKF

SEQ ID NO: 2777 - protein, 20 aa, Artificial
  Short Peptide
FWKKFKKIPPPKFKKAAKKF

SEQ ID NO: 2778 - protein, 20 aa, Artificial
  Short Peptide
KKKLLKKIPPPKFKKAAKKF

SEQ ID NO: 2779 - protein, 20 aa, Artificial
  Short Peptide
RKKLLKKIPPPKFKKAAKKF

SEQ ID NO: 2780 - protein, 20 aa, Artificial
  Short Peptide
FKKLLKKIPPPKFKKAAKKF

SEQ ID NO: 2781 - protein, 20 aa, Artificial
  Short Peptide
KWKLLKKIPPPKFKKAAKKF

SEQ ID NO: 2782 - protein, 20 aa, Artificial
  Short Peptide
RWKLLKKIPPPKFKKAAKKF

SEQ ID NO: 2783 - protein, 20 aa, Artificial
  Short Peptide
FWKLLKKIPPPKFKKAAKKF

SEQ ID NO: 2784 - protein, 20 aa, Artificial
  Short Peptide
KKKKLKKIPPPKFKKAAKKF

SEQ ID NO: 2785 - protein, 20 aa, Artificial
  Short Peptide
RKKKLKKIPPPKFKKAAKKF

SEQ ID NO: 2786 - protein, 20 aa, Artificial
  Short Peptide
FKKKLKKIPPPKFKKAAKKF

SEQ ID NO: 2787 - protein, 20 aa, Artificial
  Short Peptide
KWKKLKKIPPPKFKKAAKKF

SEQ ID NO: 2788 - protein, 20 aa, Artificial
  Short Peptide
RWKKLKKIPPPKFKKAAKKF

SEQ ID NO: 2789 - protein, 20 aa, Artificial
  Short Peptide
FWKKLKKIPPPKFKKAAKKF

SEQ ID NO: 2790 - protein, 19 aa, Artificial
  Short Peptide
KKKLFLKIPPKFKKAAKKF

SEQ ID NO: 2791 - protein, 19 aa, Artificial
  Short Peptide
RKKLFLKIPPKFKKAAKKF

SEQ ID NO: 2792 - protein, 19 aa, Artificial
  Short Peptide
FKKLFLKIPPKFKKAAKKF

SEQ ID NO: 2793 - protein, 19 aa, Artificial
  Short Peptide
KWKLFLKIPPKFKKAAKKF

SEQ ID NO: 2794 - protein, 19 aa, Artificial
  Short Peptide
RWKLFLKIPPKFKKAAKKF

SEQ ID NO: 2795 - protein, 19 aa, Artificial
  Short Peptide
FWKLFLKIPPKFKKAAKKF

SEQ ID NO: 2796 - protein, 19 aa, Artificial
  Short Peptide
KKKKFLKIPPKFKKAAKKF

SEQ ID NO: 2797 - protein, 19 aa, Artificial
  Short Peptide
RKKKFLKIPPKFKKAAKKF

SEQ ID NO: 2798 - protein, 19 aa, Artificial
  Short Peptide
FKKKFLKIPPKFKKAAKKF

SEQ ID NO: 2799 - protein, 19 aa, Artificial
  Short Peptide
KWKKFLKIPPKFKKAAKKF

SEQ ID NO: 2800 - protein, 19 aa, Artificial
  Short Peptide
RWKKFLKIPPKFKKAAKKF

SEQ ID NO: 2801 - protein, 19 aa, Artificial
  Short Peptide
FWKKFLKIPPKFKKAAKKF

SEQ ID NO: 2802 - protein, 19 aa, Artificial
  Short Peptide
KKKLLLKIPPKFKKAAKKF

SEQ ID NO: 2803 - protein, 19 aa, Artificial
  Short Peptide
RKKLLLKIPPKFKKAAKKF

SEQ ID NO: 2804 - protein, 19 aa, Artificial
  Short Peptide
FKKLLLKIPPKFKKAAKKF

SEQ ID NO: 2805 - protein, 19 aa, Artificial
  Short Peptide
KWKLLLKIPPKFKKAAKKF

SEQ ID NO: 2806 - protein, 19 aa, Artificial
  Short Peptide
RWKLLLKIPPKFKKAAKKF

SEQ ID NO: 2807 - protein, 19 aa, Artificial
  Short Peptide
FWKLLLKIPPKFKKAAKKF

SEQ ID NO: 2808 - protein, 19 aa, Artificial
  Short Peptide
KKKKLLKIPPKFKKAAKKF

SEQ ID NO: 2809 - protein, 19 aa, Artificial
  Short Peptide
RKKKLLKIPPKFKKAAKKF

SEQ ID NO: 2810 - protein, 19 aa, Artificial
  Short Peptide
FKKKLLKIPPKFKKAAKKF

SEQ ID NO: 2811 - protein, 19 aa, Artificial
  Short Peptide
KWKKLLKIPPKFKKAAKKF

SEQ ID NO: 2812 - protein, 19 aa, Artificial
  Short Peptide
RWKKLLKIPPKFKKAAKKF

SEQ ID NO: 2813 - protein, 19 aa, Artificial
  Short Peptide
FWKKLLKIPPKFKKAAKKF

SEQ ID NO: 2814 - protein, 19 aa, Artificial
  Short Peptide
KKKLFKKIPPKFKKAAKKF

SEQ ID NO: 2815 - protein, 19 aa, Artificial
  Short Peptide
RKKLFKKIPPKFKKAAKKF

SEQ ID NO: 2816 - protein, 19 aa, Artificial
  Short Peptide
FKKLFKKIPPKFKKAAKKF

SEQ ID NO: 2817 - protein, 19 aa, Artificial
  Short Peptide
KWKLFKKIPPKFKKAAKKF

SEQ ID NO: 2818 - protein, 19 aa, Artificial
  Short Peptide
RWKLFKKIPPKFKKAAKKF

SEQ ID NO: 2819 - protein, 19 aa, Artificial
  Short Peptide
FWKLFKKIPPKFKKAAKKF

SEQ ID NO: 2820 - protein, 19 aa, Artificial
  Short Peptide
KKKKFKKIPPKFKKAAKKF

SEQ ID NO: 2821 - protein, 19 aa, Artificial
  Short Peptide
RKKKFKKIPPKFKKAAKKF

SEQ ID NO: 2822 - protein, 19 aa, Artificial
  Short Peptide
FKKKFKKIPPKFKKAAKKF

SEQ ID NO: 2823 - protein, 19 aa, Artificial
  Short Peptide
KWKKFKKIPPKFKKAAKKF

SEQ ID NO: 2824 - protein, 19 aa, Artificial
  Short Peptide
RWKKFKKIPPKFKKAAKKF

SEQ ID NO: 2825 - protein, 19 aa, Artificial
  Short Peptide
FWKKFKKIPPKFKKAAKKF

SEQ ID NO: 2826 - protein, 19 aa, Artificial
  Short Peptide
KKKLLKKIPPKFKKAAKKF

SEQ ID NO: 2827 - protein, 19 aa, Artificial
  Short Peptide
RKKLLKKIPPKFKKAAKKF

SEQ ID NO: 2828 - protein, 19 aa, Artificial
  Short Peptide
FKKLLKKIPPKFKKAAKKF

SEQ ID NO: 2829 - protein, 19 aa, Artificial
  Short Peptide
KWKLLKKIPPKFKKAAKKF

SEQ ID NO: 2830 - protein, 19 aa, Artificial
  Short Peptide
RWKLLKKIPPKFKKAAKKF

SEQ ID NO: 2831 - protein, 19 aa, Artificial
  Short Peptide
FWKLLKKIPPKFKKAAKKF

SEQ ID NO: 2832 - protein, 19 aa, Artificial
  Short Peptide
KKKKLKKIPPKFKKAAKKF

SEQ ID NO: 2833 - protein, 19 aa, Artificial
  Short Peptide
RKKKLKKIPPKFKKAAKKF

SEQ ID NO: 2834 - protein, 19 aa, Artificial
  Short Peptide
FKKKLKKIPPKFKKAAKKF

SEQ ID NO: 2835 - protein, 19 aa, Artificial
  Short Peptide
KWKKLKKIPPKFKKAAKKF

SEQ ID NO: 2836 - protein, 19 aa, Artificial
  Short Peptide
RWKKLKKIPPKFKKAAKKF

SEQ ID NO: 2837 - protein, 19 aa, Artificial
  Short Peptide
FWKKLKKIPPKFKKAAKKF

SEQ ID NO: 2838 - protein, 18 aa, Artificial
  Short Peptide
KKKLFLKIPKFKKAAKKF

SEQ ID NO: 2839 - protein, 18 aa, Artificial
  Short Peptide
RKKLFLKIPKFKKAAKKF

SEQ ID NO: 2840 - protein, 18 aa, Artificial
  Short Peptide
FKKLFLKIPKFKKAAKKF

SEQ ID NO: 2841 - protein, 18 aa, Artificial
  Short Peptide
KWKLFLKIPKFKKAAKKF

SEQ ID NO: 2842 - protein, 18 aa, Artificial
  Short Peptide
RWKLFLKIPKFKKAAKKF

SEQ ID NO: 2843 - protein, 18 aa, Artificial
  Short Peptide
FWKLFLKIPKFKKAAKKF

SEQ ID NO: 2844 - protein, 18 aa, Artificial
  Short Peptide
KKKKFLKIPKFKKAAKKF

SEQ ID NO: 2845 - protein, 18 aa, Artificial
  Short Peptide
RKKKFLKIPKFKKAAKKF

SEQ ID NO: 2846 - protein, 18 aa, Artificial
  Short Peptide
FKKKFLKIPKFKKAAKKF

SEQ ID NO: 2847 - protein, 18 aa, Artificial
  Short Peptide
KWKKFLKIPKFKKAAKKF

SEQ ID NO: 2848 - protein, 18 aa, Artificial
  Short Peptide
RWKKFLKIPKFKKAAKKF

SEQ ID NO: 2849 - protein, 18 aa, Artificial
  Short Peptide
FWKKFLKIPKFKKAAKKF

SEQ ID NO: 2850 - protein, 18 aa, Artificial
  Short Peptide
KKKLLLKIPKFKKAAKKF

SEQ ID NO: 2851 - protein, 18 aa, Artificial
  Short Peptide
RKKLLLKIPKFKKAAKKF

SEQ ID NO: 2852 - protein, 18 aa, Artificial
  Short Peptide
FKKLLLKIPKFKKAAKKF

SEQ ID NO: 2853 - protein, 18 aa, Artificial
  Short Peptide
KWKLLLKIPKFKKAAKKF

SEQ ID NO: 2854 - protein, 18 aa, Artificial
  Short Peptide
RWKLLLKIPKFKKAAKKF

SEQ ID NO: 2855 - protein, 18 aa, Artificial
  Short Peptide
FWKLLLKIPKFKKAAKKF

SEQ ID NO: 2856 - protein, 18 aa, Artificial
  Short Peptide
KKKKLLKIPKFKKAAKKF

SEQ ID NO: 2857 - protein, 18 aa, Artificial
  Short Peptide
RKKKLLKIPKFKKAAKKF

SEQ ID NO: 2858 - protein, 18 aa, Artificial
  Short Peptide
FKKKLLKIPKFKKAAKKF

SEQ ID NO: 2859 - protein, 18 aa, Artificial
  Short Peptide
KWKKLLKIPKFKKAAKKF

SEQ ID NO: 2860 - protein, 18 aa, Artificial
  Short Peptide
RWKKLLKIPKFKKAAKKF

SEQ ID NO: 2861 - protein, 18 aa, Artificial
  Short Peptide
FWKKLLKIPKFKKAAKKF

SEQ ID NO: 2862 - protein, 18 aa, Artificial
  Short Peptide
KKKLFKKIPKFKKAAKKF

SEQ ID NO: 2863 - protein, 18 aa, Artificial
  Short Peptide
RKKLFKKIPKFKKAAKKF

SEQ ID NO: 2864 - protein, 18 aa, Artificial
  Short Peptide
FKKLFKKIPKFKKAAKKF

SEQ ID NO: 2865 - protein, 18 aa, Artificial
  Short Peptide
KWKLFKKIPKFKKAAKKF

SEQ ID NO: 2866 - protein, 18 aa, Artificial
  Short Peptide
RWKLFKKIPKFKKAAKKF

SEQ ID NO: 2867 - protein, 18 aa, Artificial
  Short Peptide
FWKLFKKIPKFKKAAKKF

SEQ ID NO: 2868 - protein, 18 aa, Artificial
  Short Peptide
KKKKFKKIPKFKKAAKKF

SEQ ID NO: 2869 - protein, 18 aa, Artificial
  Short Peptide
RKKKFKKIPKFKKAAKKF

SEQ ID NO: 2870 - protein, 18 aa, Artificial
  Short Peptide
FKKKFKKIPKFKKAAKKF

SEQ ID NO: 2871 - protein, 18 aa, Artificial
  Short Peptide
KWKKFKKIPKFKKAAKKF

SEQ ID NO: 2872 - protein, 18 aa, Artificial
  Short Peptide
RWKKFKKIPKFKKAAKKF

SEQ ID NO: 2873 - protein, 18 aa, Artificial
  Short Peptide
FWKKFKKIPKFKKAAKKF

SEQ ID NO: 2874 - protein, 18 aa, Artificial
  Short Peptide
KKKLLKKIPKFKKAAKKF

SEQ ID NO: 2875 - protein, 18 aa, Artificial
  Short Peptide
RKKLLKKIPKFKKAAKKF

SEQ ID NO: 2876 - protein, 18 aa, Artificial
  Short Peptide
FKKLLKKIPKFKKAAKKF

SEQ ID NO: 2877 - protein, 18 aa, Artificial
  Short Peptide
KWKLLKKIPKFKKAAKKF

SEQ ID NO: 2878 - protein, 18 aa, Artificial
  Short Peptide
RWKLLKKIPKFKKAAKKF

SEQ ID NO: 2879 - protein, 18 aa, Artificial
  Short Peptide
FWKLLKKIPKFKKAAKKF

SEQ ID NO: 2880 - protein, 18 aa, Artificial
  Short Peptide
KKKKLKKIPKFKKAAKKF

SEQ ID NO: 2881 - protein, 18 aa, Artificial
  Short Peptide
RKKKLKKIPKFKKAAKKF

SEQ ID NO: 2882 - protein, 18 aa, Artificial
  Short Peptide
FKKKLKKIPKFKKAAKKF

SEQ ID NO: 2883 - protein, 18 aa, Artificial
  Short Peptide
KWKKLKKIPKFKKAAKKF

SEQ ID NO: 2884 - protein, 18 aa, Artificial
  Short Peptide
RWKKLKKIPKFKKAAKKF

SEQ ID NO: 2885 - protein, 18 aa, Artificial
  Short Peptide
FWKKLKKIPKFKKAAKKF

SEQ ID NO: 2886 - protein, 20 aa, Artificial
  Short Peptide
KKKLFLKIPPPKFLHLAKKF

SEQ ID NO: 2887 - protein, 20 aa, Artificial
  Short Peptide
RKKLFLKIPPPKFLHLAKKF

SEQ ID NO: 2888 - protein, 20 aa, Artificial
  Short Peptide
FKKLFLKIPPPKFLHLAKKF

SEQ ID NO: 2889 - protein, 20 aa, Artificial
  Short Peptide
KWKLFLKIPPPKFLHLAKKF

SEQ ID NO: 2890 - protein, 20 aa, Artificial
  Short Peptide
RWKLFLKIPPPKFLHLAKKF

SEQ ID NO: 2891 - protein, 20 aa, Artificial
  Short Peptide
FWKLFLKIPPPKFLHLAKKF

SEQ ID NO: 2892 - protein, 20 aa, Artificial
  Short Peptide
KKKKFLKIPPPKFLHLAKKF

SEQ ID NO: 2893 - protein, 20 aa, Artificial
  Short Peptide
RKKKFLKIPPPKFLHLAKKF

SEQ ID NO: 2894 - protein, 20 aa, Artificial
  Short Peptide
FKKKFLKIPPPKFLHLAKKF

SEQ ID NO: 2895 - protein, 20 aa, Artificial
  Short Peptide
KWKKFLKIPPPKFLHLAKKF

SEQ ID NO: 2896 - protein, 20 aa, Artificial
  Short Peptide
RWKKFLKIPPPKFLHLAKKF

SEQ ID NO: 2897 - protein, 20 aa, Artificial
  Short Peptide
FWKKFLKIPPPKFLHLAKKF

SEQ ID NO: 2898 - protein, 20 aa, Artificial
  Short Peptide
KKKLLLKIPPPKFLHLAKKF

SEQ ID NO: 2899 - protein, 20 aa, Artificial
  Short Peptide
RKKLLLKIPPPKFLHLAKKF

SEQ ID NO: 2900 - protein, 20 aa, Artificial
  Short Peptide
FKKLLLKIPPPKFLHLAKKF

SEQ ID NO: 2901 - protein, 20 aa, Artificial
  Short Peptide
KWKLLLKIPPPKFLHLAKKF

SEQ ID NO: 2902 - protein, 20 aa, Artificial
  Short Peptide
RWKLLLKIPPPKFLHLAKKF

SEQ ID NO: 2903 - protein, 20 aa, Artificial
  Short Peptide
FWKLLLKIPPPKFLHLAKKF

SEQ ID NO: 2904 - protein, 20 aa, Artificial
  Short Peptide
KKKKLLKIPPPKFLHLAKKF

SEQ ID NO: 2905 - protein, 20 aa, Artificial
  Short Peptide
RKKKLLKIPPPKFLHLAKKF

SEQ ID NO: 2906 - protein, 20 aa, Artificial
  Short Peptide
FKKKLLKIPPPKFLHLAKKF

SEQ ID NO: 2907 - protein, 20 aa, Artificial
  Short Peptide
KWKKLLKIPPPKFLHLAKKF

SEQ ID NO: 2908 - protein, 20 aa, Artificial
  Short Peptide
RWKKLLKIPPPKFLHLAKKF

SEQ ID NO: 2909 - protein, 20 aa, Artificial
  Short Peptide
FWKKLLKIPPPKFLHLAKKF

SEQ ID NO: 2910 - protein, 20 aa, Artificial
  Short Peptide
KKKLFKKIPPPKFLHLAKKF

SEQ ID NO: 2911 - protein, 20 aa, Artificial
  Short Peptide
RKKLFKKIPPPKFLHLAKKF

SEQ ID NO: 2912 - protein, 20 aa, Artificial
  Short Peptide
FKKLFKKIPPPKFLHLAKKF

SEQ ID NO: 2913 - protein, 20 aa, Artificial
  Short Peptide
KWKLFKKIPPPKFLHLAKKF

SEQ ID NO: 2914 - protein, 20 aa, Artificial
  Short Peptide
RWKLFKKIPPPKFLHLAKKF

SEQ ID NO: 2915 - protein, 20 aa, Artificial
  Short Peptide
FWKLFKKIPPPKFLHLAKKF

SEQ ID NO: 2916 - protein, 20 aa, Artificial
  Short Peptide
KKKKFKKIPPPKFLHLAKKF

SEQ ID NO: 2917 - protein, 20 aa, Artificial
  Short Peptide
RKKKFKKIPPPKFLHLAKKF

SEQ ID NO: 2918 - protein, 20 aa, Artificial
  Short Peptide
FKKKFKKIPPPKFLHLAKKF

SEQ ID NO: 2919 - protein, 20 aa, Artificial
  Short Peptide
KWKKFKKIPPPKFLHLAKKF

SEQ ID NO: 2920 - protein, 20 aa, Artificial
  Short Peptide
RWKKFKKIPPPKFLHLAKKF

SEQ ID NO: 2921 - protein, 20 aa, Artificial
  Short Peptide
FWKKFKKIPPPKFLHLAKKF

SEQ ID NO: 2922 - protein, 20 aa, Artificial
  Short Peptide
KKKLLKKIPPPKFLHLAKKF

SEQ ID NO: 2923 - protein, 20 aa, Artificial
  Short Peptide
RKKLLKKIPPPKFLHLAKKF

SEQ ID NO: 2924 - protein, 20 aa, Artificial
  Short Peptide
FKKLLKKIPPPKFLHLAKKF

SEQ ID NO: 2925 - protein, 20 aa, Artificial
  Short Peptide
KWKLLKKIPPPKFLHLAKKF

SEQ ID NO: 2926 - protein, 20 aa, Artificial
  Short Peptide
RWKLLKKIPPPKFLHLAKKF

SEQ ID NO: 2927 - protein, 20 aa, Artificial
  Short Peptide
FWKLLKKIPPPKFLHLAKKF

SEQ ID NO: 2928 - protein, 20 aa, Artificial
  Short Peptide
KKKKLKKIPPPKFLHLAKKF

SEQ ID NO: 2929 - protein, 20 aa, Artificial
  Short Peptide
RKKKLKKIPPPKFLHLAKKF

SEQ ID NO: 2930 - protein, 20 aa, Artificial
  Short Peptide
FKKKLKKIPPPKFLHLAKKF

SEQ ID NO: 2931 - protein, 20 aa, Artificial
  Short Peptide
KWKKLKKIPPPKFLHLAKKF

SEQ ID NO: 2932 - protein, 20 aa, Artificial
  Short Peptide
RWKKLKKIPPPKFLHLAKKF

SEQ ID NO: 2933 - protein, 20 aa, Artificial
  Short Peptide
FWKKLKKIPPPKFLHLAKKF

SEQ ID NO: 2934 - protein, 19 aa, Artificial
  Short Peptide
KKKLFLKIPPKFLHLAKKF

SEQ ID NO: 2935 - protein, 19 aa, Artificial
  Short Peptide
RKKLFLKIPPKFLHLAKKF

SEQ ID NO: 2936 - protein, 19 aa, Artificial
  Short Peptide
FKKLFLKIPPKFLHLAKKF

SEQ ID NO: 2937 - protein, 19 aa, Artificial
  Short Peptide
KWKLFLKIPPKFLHLAKKF

SEQ ID NO: 2938 - protein, 19 aa, Artificial
  Short Peptide
RWKLFLKIPPKFLHLAKKF

SEQ ID NO: 2939 - protein, 19 aa, Artificial
  Short Peptide
FWKLFLKIPPKFLHLAKKF

SEQ ID NO: 2940 - protein, 19 aa, Artificial
  Short Peptide
KKKKFLKIPPKFLHLAKKF

SEQ ID NO: 2941 - protein, 19 aa, Artificial
  Short Peptide
RKKKFLKIPPKFLHLAKKF

SEQ ID NO: 2942 - protein, 19 aa, Artificial
  Short Peptide
FKKKFLKIPPKFLHLAKKF

SEQ ID NO: 2943 - protein, 19 aa, Artificial
  Short Peptide
KWKKFLKIPPKFLHLAKKF

SEQ ID NO: 2944 - protein, 19 aa, Artificial
  Short Peptide
RWKKFLKIPPKFLHLAKKF

SEQ ID NO: 2945 - protein, 19 aa, Artificial
  Short Peptide
FWKKFLKIPPKFLHLAKKF

SEQ ID NO: 2946 - protein, 19 aa, Artificial
  Short Peptide
KKKLLLKIPPKFLHLAKKF

SEQ ID NO: 2947 - protein, 19 aa, Artificial
  Short Peptide
RKKLLLKIPPKFLHLAKKF

SEQ ID NO: 2948 - protein, 19 aa, Artificial
  Short Peptide
FKKLLLKIPPKFLHLAKKF

SEQ ID NO: 2949 - protein, 19 aa, Artificial
  Short Peptide
KWKLLLKIPPKFLHLAKKF

SEQ ID NO: 2950 - protein, 19 aa, Artificial
  Short Peptide
RWKLLLKIPPKFLHLAKKF

SEQ ID NO: 2951 - protein, 19 aa, Artificial
  Short Peptide
FWKLLLKIPPKFLHLAKKF

SEQ ID NO: 2952 - protein, 19 aa, Artificial
  Short Peptide
KKKKLLKIPPKFLHLAKKF

SEQ ID NO: 2953 - protein, 19 aa, Artificial
  Short Peptide
RKKKLLKIPPKFLHLAKKF

SEQ ID NO: 2954 - protein, 19 aa, Artificial
  Short Peptide
FKKKLLKIPPKFLHLAKKF

SEQ ID NO: 2955 - protein, 19 aa, Artificial
  Short Peptide
KWKKLLKIPPKFLHLAKKF

SEQ ID NO: 2956 - protein, 19 aa, Artificial
  Short Peptide
RWKKLLKIPPKFLHLAKKF

SEQ ID NO: 2957 - protein, 19 aa, Artificial
  Short Peptide
FWKKLLKIPPKFLHLAKKF

SEQ ID NO: 2958 - protein, 19 aa, Artificial
  Short Peptide
KKKLFKKIPPKFLHLAKKF

SEQ ID NO: 2959 - protein, 19 aa, Artificial
  Short Peptide
RKKLFKKIPPKFLHLAKKF

SEQ ID NO: 2960 - protein, 19 aa, Artificial
  Short Peptide
FKKLFKKIPPKFLHLAKKF

SEQ ID NO: 2961 - protein, 19 aa, Artificial
  Short Peptide
KWKLFKKIPPKFLHLAKKF

SEQ ID NO: 2962 - protein, 19 aa, Artificial
  Short Peptide
RWKLFKKIPPKFLHLAKKF

SEQ ID NO: 2963 - protein, 19 aa, Artificial
  Short Peptide
FWKLFKKIPPKFLHLAKKF

SEQ ID NO: 2964 - protein, 19 aa, Artificial
  Short Peptide
KKKKFKKIPPKFLHLAKKF

SEQ ID NO: 2965 - protein, 19 aa, Artificial
  Short Peptide
RKKKFKKIPPKFLHLAKKF

SEQ ID NO: 2966 - protein, 19 aa, Artificial
  Short Peptide
FKKKFKKIPPKFLHLAKKF

SEQ ID NO: 2967 - protein, 19 aa, Artificial
  Short Peptide
KWKKFKKIPPKFLHLAKKF

SEQ ID NO: 2968 - protein, 19 aa, Artificial
  Short Peptide
RWKKFKKIPPKFLHLAKKF

SEQ ID NO: 2969 - protein, 19 aa, Artificial
  Short Peptide
FWKKFKKIPPKFLHLAKKF

SEQ ID NO: 2970 - protein, 19 aa, Artificial
  Short Peptide
KKKLLKKIPPKFLHLAKKF

SEQ ID NO: 2971 - protein, 19 aa, Artificial
  Short Peptide
RKKLLKKIPPKFLHLAKKF

SEQ ID NO: 2972 - protein, 19 aa, Artificial
  Short Peptide
FKKLLKKIPPKFLHLAKKF

SEQ ID NO: 2973 - protein, 19 aa, Artificial
  Short Peptide
KWKLLKKIPPKFLHLAKKF

SEQ ID NO: 2974 - protein, 19 aa, Artificial
  Short Peptide
RWKLLKKIPPKFLHLAKKF

SEQ ID NO: 2975 - protein, 19 aa, Artificial
  Short Peptide
FWKLLKKIPPKFLHLAKKF

SEQ ID NO: 2976 - protein, 19 aa, Artificial
  Short Peptide
KKKKLKKIPPKFLHLAKKF

SEQ ID NO: 2977 - protein, 19 aa, Artificial
  Short Peptide
RKKKLKKIPPKFLHLAKKF

SEQ ID NO: 2978 - protein, 19 aa, Artificial
  Short Peptide
FKKKLKKIPPKFLHLAKKF

SEQ ID NO: 2979 - protein, 19 aa, Artificial
  Short Peptide
KWKKLKKIPPKFLHLAKKF

SEQ ID NO: 2980 - protein, 19 aa, Artificial
  Short Peptide
RWKKLKKIPPKFLHLAKKF

SEQ ID NO: 2981 - protein, 19 aa, Artificial
  Short Peptide
FWKKLKKIPPKFLHLAKKF

SEQ ID NO: 2982 - protein, 18 aa, Artificial
  Short Peptide
KKKLFLKIPKFLHLAKKF

SEQ ID NO: 2983 - protein, 18 aa, Artificial
  Short Peptide
RKKLFLKIPKFLHLAKKF

SEQ ID NO: 2984 - protein, 18 aa, Artificial
  Short Peptide
FKKLFLKIPKFLHLAKKF

SEQ ID NO: 2985 - protein, 18 aa, Artificial
  Short Peptide
KWKLFLKIPKFLHLAKKF

SEQ ID NO: 2986 - protein, 18 aa, Artificial
  Short Peptide
RWKLFLKIPKFLHLAKKF

SEQ ID NO: 2987 - protein, 18 aa, Artificial
  Short Peptide
FWKLFLKIPKFLHLAKKF

SEQ ID NO: 2988 - protein, 18 aa, Artificial
  Short Peptide
KKKKFLKIPKFLHLAKKF

SEQ ID NO: 2989 - protein, 18 aa, Artificial
  Short Peptide
RKKKFLKIPKFLHLAKKF

SEQ ID NO: 2990 - protein, 18 aa, Artificial
  Short Peptide
FKKKFLKIPKFLHLAKKF

SEQ ID NO: 2991 - protein, 18 aa, Artificial
  Short Peptide
KWKKFLKIPKFLHLAKKF

SEQ ID NO: 2992 - protein, 18 aa, Artificial
  Short Peptide
RWKKFLKIPKFLHLAKKF

SEQ ID NO: 2993 - protein, 18 aa, Artificial
  Short Peptide
FWKKFLKIPKFLHLAKKF

SEQ ID NO: 2994 - protein, 18 aa, Artificial
  Short Peptide
KKKLLLKIPKFLHLAKKF

SEQ ID NO: 2995 - protein, 18 aa, Artificial
  Short Peptide
RKKLLLKIPKFLHLAKKF

SEQ ID NO: 2996 - protein, 18 aa, Artificial
  Short Peptide
FKKLLLKIPKFLHLAKKF

SEQ ID NO: 2997 - protein, 18 aa, Artificial
  Short Peptide
KWKLLLKIPKFLHLAKKF

SEQ ID NO: 2998 - protein, 18 aa, Artificial
  Short Peptide
RWKLLLKIPKFLHLAKKF

SEQ ID NO: 2999 - protein, 18 aa, Artificial
  Short Peptide
FWKLLLKIPKFLHLAKKF

SEQ ID NO: 3000 - protein, 18 aa, Artificial
  Short Peptide
KKKKLLKIPKFLHLAKKF

SEQ ID NO: 3001 - protein, 18 aa, Artificial
  Short Peptide
RKKKLLKIPKFLHLAKKF

SEQ ID NO: 3002 - protein, 18 aa, Artificial
  Short Peptide
FKKKLLKIPKFLHLAKKF

SEQ ID NO: 3003 - protein, 18 aa, Artificial
  Short Peptide
KWKKLLKIPKFLHLAKKF

SEQ ID NO: 3004 - protein, 18 aa, Artificial
  Short Peptide
RWKKLLKIPKFLHLAKKF

SEQ ID NO: 3005 - protein, 18 aa, Artificial
  Short Peptide
FWKKLLKIPKFLHLAKKF

SEQ ID NO: 3006 - protein, 18 aa, Artificial
  Short Peptide
KKKLFKKIPKFLHLAKKF

SEQ ID NO: 3007 - protein, 18 aa, Artificial
  Short Peptide
RKKLFKKIPKFLHLAKKF

SEQ ID NO: 3008 - protein, 18 aa, Artificial
  Short Peptide
FKKLFKKIPKFLHLAKKF

SEQ ID NO: 3009 - protein, 18 aa, Artificial
  Short Peptide
FWKLFKKIPKFLHLAKKF

SEQ ID NO: 3010 - protein, 18 aa, Artificial
  Short Peptide
KKKKFKKIPKFLHLAKKF

SEQ ID NO: 3011 - protein, 18 aa, Artificial
  Short Peptide
RKKKFKKIPKFLHLAKKF

SEQ ID NO: 3012 - protein, 18 aa, Artificial
  Short Peptide
FKKKFKKIPKFLHLAKKF

SEQ ID NO: 3013 - protein, 18 aa, Artificial
  Short Peptide
KWKKFKKIPKFLHLAKKF

SEQ ID NO: 3014 - protein, 18 aa, Artificial
  Short Peptide
RWKKFKKIPKFLHLAKKF

SEQ ID NO: 3015 - protein, 18 aa, Artificial
  Short Peptide
FWKKFKKIPKFLHLAKKF

SEQ ID NO: 3016 - protein, 18 aa, Artificial
  Short Peptide
KKKLLKKIPKFLHLAKKF

SEQ ID NO: 3017 - protein, 18 aa, Artificial
  Short Peptide
RKKLLKKIPKFLHLAKKF

SEQ ID NO: 3018 - protein, 18 aa, Artificial
  Short Peptide
FKKLLKKIPKFLHLAKKF

SEQ ID NO: 3019 - protein, 18 aa, Artificial
  Short Peptide
KWKLLKKIPKFLHLAKKF

SEQ ID NO: 3020 - protein, 18 aa, Artificial
  Short Peptide
RWKLLKKIPKFLHLAKKF

SEQ ID NO: 3021 - protein, 18 aa, Artificial
  Short Peptide
FWKLLKKIPKFLHLAKKF

SEQ ID NO: 3022 - protein, 18 aa, Artificial
  Short Peptide
KKKKLKKIPKFLHLAKKF

SEQ ID NO: 3023 - protein, 18 aa, Artificial
  Short Peptide
RKKKLKKIPKFLHLAKKF

SEQ ID NO: 3024 - protein, 18 aa, Artificial
  Short Peptide
FKKKLKKIPKFLHLAKKF

SEQ ID NO: 3025 - protein, 18 aa, Artificial
  Short Peptide
KWKKLKKIPKFLHLAKKF

SEQ ID NO: 3026 - protein, 18 aa, Artificial
  Short Peptide
RWKKLKKIPKFLHLAKKF

SEQ ID NO: 3027 - protein, 18 aa, Artificial
  Short Peptide
FWKKLKKIPKFLHLAKKF

SEQ ID NO: 3028 - protein, 20 aa, Artificial
  Short Peptide
KKKLFLKIPPPKFKHLAKKF

SEQ ID NO: 3029 - protein, 20 aa, Artificial
  Short Peptide
RKKLFLKIPPPKFKHLAKKF

SEQ ID NO: 3030 - protein, 20 aa, Artificial
  Short Peptide
FKKLFLKIPPPKFKHLAKKF

SEQ ID NO: 3031 - protein, 20 aa, Artificial
  Short Peptide
KWKLFLKIPPPKFKHLAKKF

SEQ ID NO: 3032 - protein, 20 aa, Artificial
  Short Peptide
RWKLFLKIPPPKFKHLAKKF

SEQ ID NO: 3033 - protein, 20 aa, Artificial
  Short Peptide
FWKLFLKIPPPKFKHLAKKF

SEQ ID NO: 3034 - protein, 20 aa, Artificial
  Short Peptide
KKKKFLKIPPPKFKHLAKKF

SEQ ID NO: 3035 - protein, 20 aa, Artificial
  Short Peptide
RKKKFLKIPPPKFKHLAKKF

SEQ ID NO: 3036 - protein, 20 aa, Artificial
  Short Peptide
FKKKFLKIPPPKFKHLAKKF

SEQ ID NO: 3037 - protein, 20 aa, Artificial
  Short Peptide
KWKKFLKIPPPKFKHLAKKF

SEQ ID NO: 3038 - protein, 20 aa, Artificial
  Short Peptide
RWKKFLKIPPPKFKHLAKKF

SEQ ID NO: 3039 - protein, 20 aa, Artificial
  Short Peptide
FWKKFLKIPPPKFKHLAKKF

SEQ ID NO: 3040 - protein, 20 aa, Artificial
  Short Peptide
KKKLLLKIPPPKFKHLAKKF

SEQ ID NO: 3041 - protein, 20 aa, Artificial
  Short Peptide
RKKLLLKIPPPKFKHLAKKF

SEQ ID NO: 3042 - protein, 20 aa, Artificial
  Short Peptide
FKKLLLKIPPPKFKHLAKKF

SEQ ID NO: 3043 - protein, 20 aa, Artificial
  Short Peptide
KWKLLLKIPPPKFKHLAKKF

SEQ ID NO: 3044 - protein, 20 aa, Artificial
  Short Peptide
RWKLLLKIPPPKFKHLAKKF

SEQ ID NO: 3045 - protein, 20 aa, Artificial
  Short Peptide
FWKLLLKIPPPKFKHLAKKF

SEQ ID NO: 3046 - protein, 20 aa, Artificial
  Short Peptide
KKKKLLKIPPPKFKHLAKKF

SEQ ID NO: 3047 - protein, 20 aa, Artificial
  Short Peptide
RKKKLLKIPPPKFKHLAKKF

SEQ ID NO: 3048 - protein, 20 aa, Artificial
  Short Peptide
FKKKLLKIPPPKFKHLAKKF

SEQ ID NO: 3049 - protein, 20 aa, Artificial
  Short Peptide
KWKKLLKIPPPKFKHLAKKF

SEQ ID NO: 3050 - protein, 20 aa, Artificial
  Short Peptide
RWKKLLKIPPPKFKHLAKKF

SEQ ID NO: 3051 - protein, 20 aa, Artificial
  Short Peptide
FWKKLLKIPPPKFKHLAKKF

SEQ ID NO: 3052 - protein, 20 aa, Artificial
  Short Peptide
KKKLFKKIPPPKFKHLAKKF

SEQ ID NO: 3053 - protein, 20 aa, Artificial
  Short Peptide
RKKLFKKIPPPKFKHLAKKF

SEQ ID NO: 3054 - protein, 20 aa, Artificial
  Short Peptide
FKKLFKKIPPPKFKHLAKKF

SEQ ID NO: 3055 - protein, 20 aa, Artificial
  Short Peptide
KWKLFKKIPPPKFKHLAKKF

SEQ ID NO: 3056 - protein, 20 aa, Artificial
  Short Peptide
RWKLFKKIPPPKFKHLAKKF

SEQ ID NO: 3057 - protein, 20 aa, Artificial
  Short Peptide
FWKLFKKIPPPKFKHLAKKF

SEQ ID NO: 3058 - protein, 20 aa, Artificial
  Short Peptide
KKKKFKKIPPPKFKHLAKKF

SEQ ID NO: 3059 - protein, 20 aa, Artificial
  Short Peptide
RKKKFKKIPPPKFKHLAKKF

SEQ ID NO: 3060 - protein, 20 aa, Artificial
  Short Peptide
FKKKFKKIPPPKFKHLAKKF

SEQ ID NO: 3061 - protein, 20 aa, Artificial
  Short Peptide
KWKKFKKIPPPKFKHLAKKF

SEQ ID NO: 3062 - protein, 20 aa, Artificial
  Short Peptide
RWKKFKKIPPPKFKHLAKKF

SEQ ID NO: 3063 - protein, 20 aa, Artificial
  Short Peptide
FWKKFKKIPPPKFKHLAKKF

SEQ ID NO: 3064 - protein, 20 aa, Artificial
  Short Peptide
KKKLLKKIPPPKFKHLAKKF

SEQ ID NO: 3065 - protein, 20 aa, Artificial
  Short Peptide
RKKLLKKIPPPKFKHLAKKF

SEQ ID NO: 3066 - protein, 20 aa, Artificial
  Short Peptide
FKKLLKKIPPPKFKHLAKKF

SEQ ID NO: 3067 - protein, 20 aa, Artificial
  Short Peptide
KWKLLKKIPPPKFKHLAKKF

SEQ ID NO: 3068 - protein, 20 aa, Artificial
  Short Peptide
RWKLLKKIPPPKFKHLAKKF

SEQ ID NO: 3069 - protein, 20 aa, Artificial
  Short Peptide
FWKLLKKIPPPKFKHLAKKF

SEQ ID NO: 3070 - protein, 20 aa, Artificial
  Short Peptide
KKKKLKKIPPPKFKHLAKKF

SEQ ID NO: 3071 - protein, 20 aa, Artificial
  Short Peptide
RKKKLKKIPPPKFKHLAKKF

SEQ ID NO: 3072 - protein, 20 aa, Artificial
  Short Peptide
FKKKLKKIPPPKFKHLAKKF

SEQ ID NO: 3073 - protein, 20 aa, Artificial
  Short Peptide
KWKKLKKIPPPKFKHLAKKF

SEQ ID NO: 3074 - protein, 20 aa, Artificial
  Short Peptide
RWKKLKKIPPPKFKHLAKKF

SEQ ID NO: 3075 - protein, 20 aa, Artificial
  Short Peptide
FWKKLKKIPPPKFKHLAKKF

SEQ ID NO: 3076 - protein, 19 aa, Artificial
  Short Peptide
KKKLFLKIPPKFKHLAKKF

SEQ ID NO: 3077 - protein, 19 aa, Artificial
  Short Peptide
RKKLFLKIPPKFKHLAKKF

SEQ ID NO: 3078 - protein, 19 aa, Artificial
  Short Peptide
FKKLFLKIPPKFKHLAKKF

SEQ ID NO: 3079 - protein, 19 aa, Artificial
  Short Peptide
KWKLFLKIPPKFKHLAKKF

SEQ ID NO: 3080 - protein, 19 aa, Artificial
  Short Peptide
RWKLFLKIPPKFKHLAKKF

SEQ ID NO: 3081 - protein, 19 aa, Artificial
  Short Peptide
FWKLFLKIPPKFKHLAKKF

SEQ ID NO: 3082 - protein, 19 aa, Artificial
  Short Peptide
KKKKFLKIPPKFKHLAKKF

SEQ ID NO: 3083 - protein, 19 aa, Artificial
  Short Peptide
RKKKFLKIPPKFKHLAKKF

SEQ ID NO: 3084 - protein, 19 aa, Artificial
  Short Peptide
FKKKFLKIPPKFKHLAKKF

SEQ ID NO: 3085 - protein, 19 aa, Artificial
  Short Peptide
KWKKFLKIPPKFKHLAKKF

SEQ ID NO: 3086 - protein, 19 aa, Artificial
  Short Peptide
RWKKFLKIPPKFKHLAKKF

SEQ ID NO: 3087 - protein, 19 aa, Artificial
  Short Peptide
FWKKFLKIPPKFKHLAKKF

SEQ ID NO: 3088 - protein, 19 aa, Artificial
  Short Peptide
KKKLLLKIPPKFKHLAKKF

SEQ ID NO: 3089 - protein, 19 aa, Artificial
  Short Peptide
RKKLLLKIPPKFKHLAKKF

SEQ ID NO: 3090 - protein, 19 aa, Artificial
  Short Peptide
FKKLLLKIPPKFKHLAKKF

SEQ ID NO: 3091 - protein, 19 aa, Artificial
  Short Peptide
KWKLLLKIPPKFKHLAKKF

SEQ ID NO: 3092 - protein, 19 aa, Artificial
  Short Peptide
RWKLLLKIPPKFKHLAKKF

SEQ ID NO: 3093 - protein, 19 aa, Artificial
  Short Peptide
FWKLLLKIPPKFKHLAKKF

SEQ ID NO: 3094 - protein, 19 aa, Artificial
  Short Peptide
KKKKLLKIPPKFKHLAKKF

SEQ ID NO: 3095 - protein, 19 aa, Artificial
  Short Peptide
RKKKLLKIPPKFKHLAKKF

SEQ ID NO: 3096 - protein, 19 aa, Artificial
  Short Peptide
FKKKLLKIPPKFKHLAKKF

SEQ ID NO: 3097 - protein, 19 aa, Artificial
  Short Peptide
KWKKLLKIPPKFKHLAKKF

SEQ ID NO: 3098 - protein, 19 aa, Artificial
  Short Peptide
RWKKLLKIPPKFKHLAKKF

SEQ ID NO: 3099 - protein, 19 aa, Artificial
  Short Peptide
FWKKLLKIPPKFKHLAKKF

SEQ ID NO: 3100 - protein, 19 aa, Artificial
  Short Peptide
KKKLFKKIPPKFKHLAKKF

SEQ ID NO: 3101 - protein, 19 aa, Artificial
  Short Peptide
RKKLFKKIPPKFKHLAKKF

SEQ ID NO: 3102 - protein, 19 aa, Artificial
  Short Peptide
FKKLFKKIPPKFKHLAKKF

SEQ ID NO: 3103 - protein, 19 aa, Artificial
  Short Peptide
KWKLFKKIPPKFKHLAKKF

SEQ ID NO: 3104 - protein, 19 aa, Artificial
  Short Peptide
RWKLFKKIPPKFKHLAKKF

SEQ ID NO: 3105 - protein, 19 aa, Artificial
  Short Peptide
FWKLFKKIPPKFKHLAKKF

SEQ ID NO: 3106 - protein, 19 aa, Artificial
  Short Peptide
KKKKFKKIPPKFKHLAKKF

SEQ ID NO: 3107 - protein, 19 aa, Artificial
  Short Peptide
RKKKFKKIPPKFKHLAKKF

SEQ ID NO: 3108 - protein, 19 aa, Artificial
  Short Peptide
FKKKFKKIPPKFKHLAKKF

SEQ ID NO: 3109 - protein, 19 aa, Artificial
  Short Peptide
KWKKFKKIPPKFKHLAKKF

SEQ ID NO: 3110 - protein, 19 aa, Artificial
  Short Peptide
RWKKFKKIPPKFKHLAKKF

SEQ ID NO: 3111 - protein, 19 aa, Artificial
  Short Peptide
FWKKFKKIPPKFKHLAKKF

SEQ ID NO: 3112 - protein, 19 aa, Artificial
  Short Peptide
KKKLLKKIPPKFKHLAKKF

SEQ ID NO: 3113 - protein, 19 aa, Artificial
  Short Peptide
RKKLLKKIPPKFKHLAKKF

SEQ ID NO: 3114 - protein, 19 aa, Artificial
  Short Peptide
FKKLLKKIPPKFKHLAKKF

SEQ ID NO: 3115 - protein, 19 aa, Artificial
  Short Peptide
KWKLLKKIPPKFKHLAKKF

SEQ ID NO: 3116 - protein, 19 aa, Artificial
  Short Peptide
RWKLLKKIPPKFKHLAKKF

SEQ ID NO: 3117 - protein, 19 aa, Artificial
  Short Peptide
FWKLLKKIPPKFKHLAKKF

SEQ ID NO: 3118 - protein, 19 aa, Artificial
  Short Peptide
KKKKLKKIPPKFKHLAKKF

SEQ ID NO: 3119 - protein, 19 aa, Artificial
  Short Peptide
RKKKLKKIPPKFKHLAKKF

SEQ ID NO: 3120 - protein, 19 aa, Artificial
  Short Peptide
FKKKLKKIPPKFKHLAKKF

SEQ ID NO: 3121 - protein, 19 aa, Artificial
  Short Peptide
KWKKLKKIPPKFKHLAKKF

SEQ ID NO: 3122 - protein, 19 aa, Artificial
  Short Peptide
RWKKLKKIPPKFKHLAKKF

SEQ ID NO: 3123 - protein, 19 aa, Artificial
  Short Peptide
FWKKLKKIPPKFKHLAKKF

SEQ ID NO: 3124 - protein, 18 aa, Artificial
  Short Peptide
KKKLFLKIPKFKHLAKKF

SEQ ID NO: 3125 - protein, 18 aa, Artificial
  Short Peptide
RKKLFLKIPKFKHLAKKF

SEQ ID NO: 3126 - protein, 18 aa, Artificial
  Short Peptide
FKKLFLKIPKFKHLAKKF

SEQ ID NO: 3127 - protein, 18 aa, Artificial
  Short Peptide
KWKLFLKIPKFKHLAKKF

SEQ ID NO: 3128 - protein, 18 aa, Artificial
  Short Peptide
RWKLFLKIPKFKHLAKKF

SEQ ID NO: 3129 - protein, 18 aa, Artificial
  Short Peptide
FWKLFLKIPKFKHLAKKF

SEQ ID NO: 3130 - protein, 18 aa, Artificial
  Short Peptide
KKKKFLKIPKFKHLAKKF

SEQ ID NO: 3131 - protein, 18 aa, Artificial
  Short Peptide
RKKKFLKIPKFKHLAKKF

SEQ ID NO: 3132 - protein, 18 aa, Artificial
  Short Peptide
FKKKFLKIPKFKHLAKKF

SEQ ID NO: 3133 - protein, 18 aa, Artificial
  Short Peptide
KWKKFLKIPKFKHLAKKF

SEQ ID NO: 3134 - protein, 18 aa, Artificial
  Short Peptide
RWKKFLKIPKFKHLAKKF

SEQ ID NO: 3135 - protein, 18 aa, Artificial
  Short Peptide
FWKKFLKIPKFKHLAKKF

SEQ ID NO: 3136 - protein, 18 aa, Artificial
  Short Peptide
KKKLLLKIPKFKHLAKKF

SEQ ID NO: 3137 - protein, 18 aa, Artificial
  Short Peptide
RKKLLLKIPKFKHLAKKF

SEQ ID NO: 3138 - protein, 18 aa, Artificial
  Short Peptide
FKKLLLKIPKFKHLAKKF

SEQ ID NO: 3139 - protein, 18 aa, Artificial
  Short Peptide
KWKLLLKIPKFKHLAKKF

SEQ ID NO: 3140 - protein, 18 aa, Artificial
  Short Peptide
RWKLLLKIPKFKHLAKKF

SEQ ID NO: 3141 - protein, 18 aa, Artificial
  Short Peptide
FWKLLLKIPKFKHLAKKF

SEQ ID NO: 3142 - protein, 18 aa, Artificial
  Short Peptide
KKKKLLKIPKFKHLAKKF

SEQ ID NO: 3143 - protein, 18 aa, Artificial
  Short Peptide
RKKKLLKIPKFKHLAKKF

SEQ ID NO: 3144 - protein, 18 aa, Artificial
  Short Peptide
FKKKLLKIPKFKHLAKKF

SEQ ID NO: 3145 - protein, 18 aa, Artificial
  Short Peptide
KWKKLLKIPKFKHLAKKF

SEQ ID NO: 3146 - protein, 18 aa, Artificial
  Short Peptide
RWKKLLKIPKFKHLAKKF

SEQ ID NO: 3147 - protein, 18 aa, Artificial
  Short Peptide
FWKKLLKIPKFKHLAKKF

SEQ ID NO: 3148 - protein, 18 aa, Artificial
  Short Peptide
KKKLFKKIPKFKHLAKKF

SEQ ID NO: 3149 - protein, 18 aa, Artificial
  Short Peptide
RKKLFKKIPKFKHLAKKF

SEQ ID NO: 3150 - protein, 18 aa, Artificial
  Short Peptide
FKKLFKKIPKFKHLAKKF

SEQ ID NO: 3151 - protein, 18 aa, Artificial
  Short Peptide
KWKLFKKIPKFKHLAKKF

SEQ ID NO: 3152 - protein, 18 aa, Artificial
  Short Peptide
RWKLFKKIPKFKHLAKKF

SEQ ID NO: 3153 - protein, 18 aa, Artificial
  Short Peptide
FWKLFKKIPKFKHLAKKF

SEQ ID NO: 3154 - protein, 18 aa, Artificial
  Short Peptide
KKKKFKKIPKFKHLAKKF

SEQ ID NO: 3155 - protein, 18 aa, Artificial
  Short Peptide
RKKKFKKIPKFKHLAKKF

SEQ ID NO: 3156 - protein, 18 aa, Artificial
  Short Peptide
FKKKFKKIPKFKHLAKKF

SEQ ID NO: 3157 - protein, 18 aa, Artificial
  Short Peptide
KWKKFKKIPKFKHLAKKF

SEQ ID NO: 3158 - protein, 18 aa, Artificial
  Short Peptide
RWKKFKKIPKFKHLAKKF

SEQ ID NO: 3159 - protein, 18 aa, Artificial
  Short Peptide
FWKKFKKIPKFKHLAKKF

SEQ ID NO: 3160 - protein, 18 aa, Artificial
  Short Peptide
KKKLLKKIPKFKHLAKKF

SEQ ID NO: 3161 - protein, 18 aa, Artificial
  Short Peptide
RKKLLKKIPKFKHLAKKF

SEQ ID NO: 3162 - protein, 18 aa, Artificial
  Short Peptide
FKKLLKKIPKFKHLAKKF

SEQ ID NO: 3163 - protein, 18 aa, Artificial
  Short Peptide
KWKLLKKIPKFKHLAKKF

SEQ ID NO: 3164 - protein, 18 aa, Artificial
  Short Peptide
RWKLLKKIPKFKHLAKKF

SEQ ID NO: 3165 - protein, 18 aa, Artificial
  Short Peptide
FWKLLKKIPKFKHLAKKF

SEQ ID NO: 3166 - protein, 18 aa, Artificial
  Short Peptide
KKKKLKKIPKFKHLAKKF

SEQ ID NO: 3167 - protein, 18 aa, Artificial
  Short Peptide
RKKKLKKIPKFKHLAKKF

SEQ ID NO: 3168 - protein, 18 aa, Artificial
  Short Peptide
FKKKLKKIPKFKHLAKKF

SEQ ID NO: 3169 - protein, 18 aa, Artificial
  Short Peptide
KWKKLKKIPKFKHLAKKF

SEQ ID NO: 3170 - protein, 18 aa, Artificial
  Short Peptide
RWKKLKKIPKFKHLAKKF

SEQ ID NO: 3171 - protein, 18 aa, Artificial
  Short Peptide
FWKKLKKIPKFKHLAKKF

SEQ ID NO: 3172 - protein, 20 aa, Artificial
  Short Peptide
KKKLFLKIPPPKFLKLAKKF

SEQ ID NO: 3173 - protein, 20 aa, Artificial
  Short Peptide
RKKLFLKIPPPKFLKLAKKF

SEQ ID NO: 3174 - protein, 20 aa, Artificial
  Short Peptide
FKKLFLKIPPPKFLKLAKKF

SEQ ID NO: 3175 - protein, 20 aa, Artificial
  Short Peptide
KWKLFLKIPPPKFLKLAKKF

SEQ ID NO: 3176 - protein, 20 aa, Artificial
  Short Peptide
RWKLFLKIPPPKFLKLAKKF

SEQ ID NO: 3177 - protein, 20 aa, Artificial
  Short Peptide
FWKLFLKIPPPKFLKLAKKF

SEQ ID NO: 3178 - protein, 20 aa, Artificial
  Short Peptide
KKKKFLKIPPPKFLKLAKKF

SEQ ID NO: 3179 - protein, 20 aa, Artificial
  Short Peptide
RKKKFLKIPPPKFLKLAKKF

SEQ ID NO: 3180 - protein, 20 aa, Artificial
  Short Peptide
FKKKFLKIPPPKFLKLAKKF

SEQ ID NO: 3181 - protein, 20 aa, Artificial
  Short Peptide
KWKKFLKIPPPKFLKLAKKF

SEQ ID NO: 3182 - protein, 20 aa, Artificial
  Short Peptide
RWKKFLKIPPPKFLKLAKKF

SEQ ID NO: 3183 - protein, 20 aa, Artificial
  Short Peptide
FWKKFLKIPPPKFLKLAKKF

SEQ ID NO: 3184 - protein, 20 aa, Artificial
  Short Peptide
KKKLLLKIPPPKFLKLAKKF

SEQ ID NO: 3185 - protein, 20 aa, Artificial
  Short Peptide
RKKLLLKIPPPKFLKLAKKF

SEQ ID NO: 3186 - protein, 20 aa, Artificial
  Short Peptide
FKKLLLKIPPPKFLKLAKKF

SEQ ID NO: 3187 - protein, 20 aa, Artificial
  Short Peptide
KWKLLLKIPPPKFLKLAKKF

SEQ ID NO: 3188 - protein, 20 aa, Artificial
  Short Peptide
RWKLLLKIPPPKFLKLAKKF

SEQ ID NO: 3189 - protein, 20 aa, Artificial
  Short Peptide
FWKLLLKIPPPKFLKLAKKF

SEQ ID NO: 3190 - protein, 20 aa, Artificial
  Short Peptide
KKKKLLKIPPPKFLKLAKKF

SEQ ID NO: 3191 - protein, 20 aa, Artificial
  Short Peptide
RKKKLLKIPPPKFLKLAKKF

SEQ ID NO: 3192 - protein, 20 aa, Artificial
  Short Peptide
FKKKLLKIPPPKFLKLAKKF

SEQ ID NO: 3193 - protein, 20 aa, Artificial
  Short Peptide
KWKKLLKIPPPKFLKLAKKF

SEQ ID NO: 3194 - protein, 20 aa, Artificial
  Short Peptide
RWKKLLKIPPPKFLKLAKKF

SEQ ID NO: 3195 - protein, 20 aa, Artificial
  Short Peptide
FWKKLLKIPPPKFLKLAKKF

SEQ ID NO: 3196 - protein, 20 aa, Artificial
  Short Peptide
KKKLFKKIPPPKFLKLAKKF

SEQ ID NO: 3197 - protein, 20 aa, Artificial
  Short Peptide
RKKLFKKIPPPKFLKLAKKF

SEQ ID NO: 3198 - protein, 20 aa, Artificial
  Short Peptide
FKKLFKKIPPPKFLKLAKKF

SEQ ID NO: 3199 - protein, 20 aa, Artificial
  Short Peptide
KWKLFKKIPPPKFLKLAKKF

SEQ ID NO: 3200 - protein, 20 aa, Artificial
  Short Peptide
RWKLFKKIPPPKFLKLAKKF

SEQ ID NO: 3201 - protein, 20 aa, Artificial
  Short Peptide
FWKLFKKIPPPKFLKLAKKF

SEQ ID NO: 3202 - protein, 20 aa, Artificial
  Short Peptide
KKKKFKKIPPPKFLKLAKKF

SEQ ID NO: 3203 - protein, 20 aa, Artificial
  Short Peptide
RKKKFKKIPPPKFLKLAKKF

SEQ ID NO: 3204 - protein, 20 aa, Artificial
  Short Peptide
FKKKFKKIPPPKFLKLAKKF

SEQ ID NO: 3205 - protein, 20 aa, Artificial
  Short Peptide
KWKKFKKIPPPKFLKLAKKF

SEQ ID NO: 3206 - protein, 20 aa, Artificial
  Short Peptide
RWKKFKKIPPPKFLKLAKKF

SEQ ID NO: 3207 - protein, 20 aa, Artificial
  Short Peptide
FWKKFKKIPPPKFLKLAKKF

SEQ ID NO: 3208 - protein, 20 aa, Artificial
  Short Peptide
KKKLLKKIPPPKFLKLAKKF

SEQ ID NO: 3209 - protein, 20 aa, Artificial
  Short Peptide
RKKLLKKIPPPKFLKLAKKF

SEQ ID NO: 3210 - protein, 20 aa, Artificial
  Short Peptide
FKKLLKKIPPPKFLKLAKKF

SEQ ID NO: 3211 - protein, 20 aa, Artificial
  Short Peptide
KWKLLKKIPPPKFLKLAKKF

SEQ ID NO: 3212 - protein, 20 aa, Artificial
  Short Peptide
RWKLLKKIPPPKFLKLAKKF

SEQ ID NO: 3213 - protein, 20 aa, Artificial
  Short Peptide
FWKLLKKIPPPKFLKLAKKF

SEQ ID NO: 3214 - protein, 20 aa, Artificial
  Short Peptide
KKKKLKKIPPPKFLKLAKKF

SEQ ID NO: 3215 - protein, 20 aa, Artificial
  Short Peptide
RKKKLKKIPPPKFLKLAKKF

SEQ ID NO: 3216 - protein, 20 aa, Artificial
  Short Peptide
FKKKLKKIPPPKFLKLAKKF

SEQ ID NO: 3217 - protein, 20 aa, Artificial
  Short Peptide
KWKKLKKIPPPKFLKLAKKF

SEQ ID NO: 3218 - protein, 20 aa, Artificial
  Short Peptide
RWKKLKKIPPPKFLKLAKKF

SEQ ID NO: 3219 - protein, 20 aa, Artificial
  Short Peptide
FWKKLKKIPPPKFLKLAKKF

SEQ ID NO: 3220 - protein, 19 aa, Artificial
  Short Peptide
KKKLFLKIPPKFLKLAKKF

SEQ ID NO: 3221 - protein, 19 aa, Artificial
  Short Peptide
RKKLFLKIPPKFLKLAKKF

SEQ ID NO: 3222 - protein, 19 aa, Artificial
  Short Peptide
FKKLFLKIPPKFLKLAKKF

SEQ ID NO: 3223 - protein, 19 aa, Artificial
  Short Peptide
KWKLFLKIPPKFLKLAKKF

SEQ ID NO: 3224 - protein, 19 aa, Artificial
  Short Peptide
RWKLFLKIPPKFLKLAKKF

SEQ ID NO: 3225 - protein, 19 aa, Artificial
  Short Peptide
FWKLFLKIPPKFLKLAKKF

SEQ ID NO: 3226 - protein, 19 aa, Artificial
  Short Peptide
KKKKFLKIPPKFLKLAKKF

SEQ ID NO: 3227 - protein, 19 aa, Artificial
  Short Peptide
RKKKFLKIPPKFLKLAKKF

SEQ ID NO: 3228 - protein, 19 aa, Artificial
  Short Peptide
FKKKFLKIPPKFLKLAKKF

SEQ ID NO: 3229 - protein, 19 aa, Artificial
  Short Peptide
KWKKFLKIPPKFLKLAKKF

SEQ ID NO: 3230 - protein, 19 aa, Artificial
  Short Peptide
RWKKFLKIPPKFLKLAKKF

SEQ ID NO: 3231 - protein, 19 aa, Artificial
  Short Peptide
FWKKFLKIPPKFLKLAKKF

SEQ ID NO: 3232 - protein, 19 aa, Artificial
  Short Peptide
KKKLLLKIPPKFLKLAKKF

SEQ ID NO: 3233 - protein, 19 aa, Artificial
  Short Peptide
RKKLLLKIPPKFLKLAKKF

SEQ ID NO: 3234 - protein, 19 aa, Artificial
  Short Peptide
FKKLLLKIPPKFLKLAKKF

SEQ ID NO: 3235 - protein, 19 aa, Artificial
  Short Peptide
KWKLLLKIPPKFLKLAKKF

SEQ ID NO: 3236 - protein, 19 aa, Artificial
  Short Peptide
RWKLLLKIPPKFLKLAKKF

SEQ ID NO: 3237 - protein, 19 aa, Artificial
  Short Peptide
FWKLLLKIPPKFLKLAKKF

SEQ ID NO: 3238 - protein, 19 aa, Artificial
  Short Peptide
KKKKLLKIPPKFLKLAKKF

SEQ ID NO: 3239 - protein, 19 aa, Artificial
  Short Peptide
RKKKLLKIPPKFLKLAKKF

SEQ ID NO: 3240 - protein, 19 aa, Artificial
  Short Peptide
FKKKLLKIPPKFLKLAKKF

SEQ ID NO: 3241 - protein, 19 aa, Artificial
  Short Peptide
KWKKLLKIPPKFLKLAKKF

SEQ ID NO: 3242 - protein, 19 aa, Artificial
  Short Peptide
RWKKLLKIPPKFLKLAKKF

SEQ ID NO: 3243 - protein, 19 aa, Artificial
  Short Peptide
FWKKLLKIPPKFLKLAKKF

SEQ ID NO: 3244 - protein, 19 aa, Artificial
  Short Peptide
KKKLFKKIPPKFLKLAKKF

SEQ ID NO: 3245 - protein, 19 aa, Artificial
  Short Peptide
RKKLFKKIPPKFLKLAKKF

SEQ ID NO: 3246 - protein, 19 aa, Artificial
  Short Peptide
FKKLFKKIPPKFLKLAKKF

SEQ ID NO: 3247 - protein, 19 aa, Artificial
  Short Peptide
KWKLFKKIPPKFLKLAKKF

SEQ ID NO: 3248 - protein, 19 aa, Artificial
  Short Peptide
RWKLFKKIPPKFLKLAKKF

SEQ ID NO: 3249 - protein, 19 aa, Artificial
  Short Peptide
FWKLFKKIPPKFLKLAKKF

SEQ ID NO: 3250 - protein, 19 aa, Artificial
  Short Peptide
KKKKFKKIPPKFLKLAKKF

SEQ ID NO: 3251 - protein, 19 aa, Artificial
  Short Peptide
RKKKFKKIPPKFLKLAKKF

SEQ ID NO: 3252 - protein, 19 aa, Artificial
  Short Peptide
FKKKFKKIPPKFLKLAKKF

SEQ ID NO: 3253 - protein, 19 aa, Artificial
  Short Peptide
KWKKFKKIPPKFLKLAKKF

SEQ ID NO: 3254 - protein, 19 aa, Artificial
  Short Peptide
RWKKFKKIPPKFLKLAKKF

SEQ ID NO: 3255 - protein, 19 aa, Artificial
  Short Peptide
FWKKFKKIPPKFLKLAKKF

SEQ ID NO: 3256 - protein, 19 aa, Artificial
  Short Peptide
KKKLLKKIPPKFLKLAKKF

SEQ ID NO: 3257 - protein, 19 aa, Artificial
  Short Peptide
RKKLLKKIPPKFLKLAKKF

SEQ ID NO: 3258 - protein, 19 aa, Artificial
  Short Peptide
FKKLLKKIPPKFLKLAKKF

SEQ ID NO: 3259 - protein, 19 aa, Artificial
  Short Peptide
KWKLLKKIPPKFLKLAKKF

SEQ ID NO: 3260 - protein, 19 aa, Artificial
  Short Peptide
RWKLLKKIPPKFLKLAKKF

SEQ ID NO: 3261 - protein, 19 aa, Artificial
  Short Peptide
FWKLLKKIPPKFLKLAKKF

SEQ ID NO: 3262 - protein, 19 aa, Artificial
  Short Peptide
KKKKLKKIPPKFLKLAKKF

SEQ ID NO: 3263 - protein, 19 aa, Artificial
  Short Peptide
RKKKLKKIPPKFLKLAKKF

SEQ ID NO: 3264 - protein, 19 aa, Artificial
  Short Peptide
FKKKLKKIPPKFLKLAKKF

SEQ ID NO: 3265 - protein, 19 aa, Artificial
  Short Peptide
KWKKLKKIPPKFLKLAKKF

SEQ ID NO: 3266 - protein, 19 aa, Artificial
  Short Peptide
RWKKLKKIPPKFLKLAKKF

SEQ ID NO: 3267 - protein, 19 aa, Artificial
  Short Peptide
FWKKLKKIPPKFLKLAKKF

SEQ ID NO: 3268 - protein, 18 aa, Artificial
  Short Peptide
KKKLFLKIPKFLKLAKKF

SEQ ID NO: 3269 - protein, 18 aa, Artificial
  Short Peptide
RKKLFLKIPKFLKLAKKF

SEQ ID NO: 3270 - protein, 18 aa, Artificial
  Short Peptide
FKKLFLKIPKFLKLAKKF

SEQ ID NO: 3271 - protein, 18 aa, Artificial
  Short Peptide
KWKLFLKIPKFLKLAKKF

SEQ ID NO: 3272 - protein, 18 aa, Artificial
  Short Peptide
RWKLFLKIPKFLKLAKKF

SEQ ID NO: 3273 - protein, 18 aa, Artificial
  Short Peptide
FWKLFLKIPKFLKLAKKF

SEQ ID NO: 3274 - protein, 18 aa, Artificial
  Short Peptide
KKKKFLKIPKFLKLAKKF

SEQ ID NO: 3275 - protein, 18 aa, Artificial
  Short Peptide
RKKKFLKIPKFLKLAKKF

SEQ ID NO: 3276 - protein, 18 aa, Artificial
  Short Peptide
FKKKFLKIPKFLKLAKKF

SEQ ID NO: 3277 - protein, 18 aa, Artificial
  Short Peptide
KWKKFLKIPKFLKLAKKF

SEQ ID NO: 3278 - protein, 18 aa, Artificial
  Short Peptide
RWKKFLKIPKFLKLAKKF

SEQ ID NO: 3279 - protein, 18 aa, Artificial
  Short Peptide
FWKKFLKIPKFLKLAKKF

SEQ ID NO: 3280 - protein, 18 aa, Artificial
  Short Peptide
KKKLLLKIPKFLKLAKKF

SEQ ID NO: 3281 - protein, 18 aa, Artificial
  Short Peptide
RKKLLLKIPKFLKLAKKF

SEQ ID NO: 3282 - protein, 18 aa, Artificial
  Short Peptide
FKKLLLKIPKFLKLAKKF

SEQ ID NO: 3283 - protein, 18 aa, Artificial
  Short Peptide
KWKLLLKIPKFLKLAKKF

SEQ ID NO: 3284 - protein, 18 aa, Artificial
  Short Peptide
RWKLLLKIPKFLKLAKKF

SEQ ID NO: 3285 - protein, 18 aa, Artificial
  Short Peptide
FWKLLLKIPKFLKLAKKF

SEQ ID NO: 3286 - protein, 18 aa, Artificial
  Short Peptide
KKKKLLKIPKFLKLAKKF

SEQ ID NO: 3287 - protein, 18 aa, Artificial
  Short Peptide
RKKKLLKIPKFLKLAKKF

SEQ ID NO: 3288 - protein, 18 aa, Artificial
  Short Peptide
FKKKLLKIPKFLKLAKKF

SEQ ID NO: 3289 - protein, 18 aa, Artificial
  Short Peptide
KWKKLLKIPKFLKLAKKF

SEQ ID NO: 3290 - protein, 18 aa, Artificial
  Short Peptide
RWKKLLKIPKFLKLAKKF

SEQ ID NO: 3291 - protein, 18 aa, Artificial
  Short Peptide
FWKKLLKIPKFLKLAKKF

SEQ ID NO: 3292 - protein, 18 aa, Artificial
  Short Peptide
KKKLFKKIPKFLKLAKKF

SEQ ID NO: 3293 - protein, 18 aa, Artificial
  Short Peptide
RKKLFKKIPKFLKLAKKF

SEQ ID NO: 3294 - protein, 18 aa, Artificial
  Short Peptide
FKKLFKKIPKFLKLAKKF

SEQ ID NO: 3295 - protein, 18 aa, Artificial
  Short Peptide
KWKLFKKIPKFLKLAKKF

SEQ ID NO: 3296 - protein, 18 aa, Artificial
  Short Peptide
RWKLFKKIPKFLKLAKKF

SEQ ID NO: 3297 - protein, 18 aa, Artificial
  Short Peptide
FWKLFKKIPKFLKLAKKF

SEQ ID NO: 3298 - protein, 18 aa, Artificial
  Short Peptide
KKKKFKKIPKFLKLAKKF

SEQ ID NO: 3299 - protein, 18 aa, Artificial
  Short Peptide
RKKKFKKIPKFLKLAKKF

SEQ ID NO: 3300 - protein, 18 aa, Artificial
  Short Peptide
FKKKFKKIPKFLKLAKKF

SEQ ID NO: 3301 - protein, 18 aa, Artificial
  Short Peptide
KWKKFKKIPKFLKLAKKF

SEQ ID NO: 3302 - protein, 18 aa, Artificial
  Short Peptide
RWKKFKKIPKFLKLAKKF

SEQ ID NO: 3303 - protein, 18 aa, Artificial
  Short Peptide
FWKKFKKIPKFLKLAKKF

SEQ ID NO: 3304 - protein, 18 aa, Artificial
  Short Peptide
KKKLLKKIPKFLKLAKKF

SEQ ID NO: 3305 - protein, 18 aa, Artificial
  Short Peptide
RKKLLKKIPKFLKLAKKF

SEQ ID NO: 3306 - protein, 18 aa, Artificial
  Short Peptide
FKKLLKKIPKFLKLAKKF

SEQ ID NO: 3307 - protein, 18 aa, Artificial
  Short Peptide
KWKLLKKIPKFLKLAKKF

SEQ ID NO: 3308 - protein, 18 aa, Artificial
  Short Peptide
RWKLLKKIPKFLKLAKKF

SEQ ID NO: 3309 - protein, 18 aa, Artificial
  Short Peptide
FWKLLKKIPKFLKLAKKF

SEQ ID NO: 3310 - protein, 18 aa, Artificial
  Short Peptide
KKKKLKKIPKFLKLAKKF

SEQ ID NO: 3311 - protein, 18 aa, Artificial
  Short Peptide
RKKKLKKIPKFLKLAKKF

SEQ ID NO: 3312 - protein, 18 aa, Artificial
  Short Peptide
FKKKLKKIPKFLKLAKKF

SEQ ID NO: 3313 - protein, 18 aa, Artificial
  Short Peptide
KWKKLKKIPKFLKLAKKF

SEQ ID NO: 3314 - protein, 18 aa, Artificial
  Short Peptide
RWKKLKKIPKFLKLAKKF

SEQ ID NO: 3315 - protein, 18 aa, Artificial
  Short Peptide
FWKKLKKIPKFLKLAKKF

SEQ ID NO: 3316 - protein, 20 aa, Artificial
  Short Peptide
KKKLFLKIPPPKFKKLAKKF

SEQ ID NO: 3317 - protein, 20 aa, Artificial
  Short Peptide
RKKLFLKIPPPKFKKLAKKF

SEQ ID NO: 3318 - protein, 20 aa, Artificial
  Short Peptide
FKKLFLKIPPPKFKKLAKKF

SEQ ID NO: 3319 - protein, 20 aa, Artificial
  Short Peptide
KWKLFLKIPPPKFKKLAKKF

SEQ ID NO: 3320 - protein, 20 aa, Artificial
  Short Peptide
RWKLFLKIPPPKFKKLAKKF

SEQ ID NO: 3321 - protein, 20 aa, Artificial
  Short Peptide
FWKLFLKIPPPKFKKLAKKF

SEQ ID NO: 3322 - protein, 20 aa, Artificial
  Short Peptide
KKKKFLKIPPPKFKKLAKKF

SEQ ID NO: 3323 - protein, 20 aa, Artificial
  Short Peptide
RKKKFLKIPPPKFKKLAKKF

SEQ ID NO: 3324 - protein, 20 aa, Artificial
  Short Peptide
FKKKFLKIPPPKFKKLAKKF

SEQ ID NO: 3325 - protein, 20 aa, Artificial
  Short Peptide
KWKKFLKIPPPKFKKLAKKF

SEQ ID NO: 3326 - protein, 20 aa, Artificial
  Short Peptide
RWKKFLKIPPPKFKKLAKKF

SEQ ID NO: 3327 - protein, 20 aa, Artificial
  Short Peptide
FWKKFLKIPPPKFKKLAKKF

SEQ ID NO: 3328 - protein, 20 aa, Artificial
  Short Peptide
KKKLLLKIPPPKFKKLAKKF

SEQ ID NO: 3329 - protein, 20 aa, Artificial
  Short Peptide
RKKLLLKIPPPKFKKLAKKF

SEQ ID NO: 3330 - protein, 20 aa, Artificial
  Short Peptide
FKKLLLKIPPPKFKKLAKKF

SEQ ID NO: 3331 - protein, 20 aa, Artificial
  Short Peptide
KWKLLLKIPPPKFKKLAKKF

SEQ ID NO: 3332 - protein, 20 aa, Artificial
  Short Peptide
RWKLLLKIPPPKFKKLAKKF

SEQ ID NO: 3333 - protein, 20 aa, Artificial
  Short Peptide
FWKLLLKIPPPKFKKLAKKF

SEQ ID NO: 3334 - protein, 20 aa, Artificial
  Short Peptide
KKKKLLKIPPPKFKKLAKKF

SEQ ID NO: 3335 - protein, 20 aa, Artificial
  Short Peptide
RKKKLLKIPPPKFKKLAKKF

SEQ ID NO: 3336 - protein, 20 aa, Artificial
  Short Peptide
FKKKLLKIPPPKFKKLAKKF

SEQ ID NO: 3337 - protein, 20 aa, Artificial
  Short Peptide
KWKKLLKIPPPKFKKLAKKF

SEQ ID NO: 3338 - protein, 20 aa, Artificial
  Short Peptide
RWKKLLKIPPPKFKKLAKKF

SEQ ID NO: 3339 - protein, 20 aa, Artificial
  Short Peptide
FWKKLLKIPPPKFKKLAKKF

SEQ ID NO: 3340 - protein, 20 aa, Artificial
  Short Peptide
KKKLFKKIPPPKFKKLAKKF

SEQ ID NO: 3341 - protein, 20 aa, Artificial
  Short Peptide
RKKLFKKIPPPKFKKLAKKF

SEQ ID NO: 3342 - protein, 20 aa, Artificial
  Short Peptide
FKKLFKKIPPPKFKKLAKKF

SEQ ID NO: 3343 - protein, 20 aa, Artificial
  Short Peptide
KWKLFKKIPPPKFKKLAKKF

SEQ ID NO: 3344 - protein, 20 aa, Artificial
  Short Peptide
RWKLFKKIPPPKFKKLAKKF

SEQ ID NO: 3345 - protein, 20 aa, Artificial
  Short Peptide
FWKLFKKIPPPKFKKLAKKF

SEQ ID NO: 3346 - protein, 20 aa, Artificial
  Short Peptide
KKKKFKKIPPPKFKKLAKKF

SEQ ID NO: 3347 - protein, 20 aa, Artificial
  Short Peptide
RKKKFKKIPPPKFKKLAKKF

SEQ ID NO: 3348 - protein, 20 aa, Artificial
  Short Peptide
FKKKFKKIPPPKFKKLAKKF

SEQ ID NO: 3349 - protein, 20 aa, Artificial
  Short Peptide
KWKKFKKIPPPKFKKLAKKF

SEQ ID NO: 3350 - protein, 20 aa, Artificial
  Short Peptide
RWKKFKKIPPPKFKKLAKKF

SEQ ID NO: 3351 - protein, 20 aa, Artificial
  Short Peptide
FWKKFKKIPPPKFKKLAKKF

SEQ ID NO: 3352 - protein, 20 aa, Artificial
  Short Peptide
KKKLLKKIPPPKFKKLAKKF

SEQ ID NO: 3353 - protein, 20 aa, Artificial
  Short Peptide
RKKLLKKIPPPKFKKLAKKF

SEQ ID NO: 3354 - protein, 20 aa, Artificial
  Short Peptide
FKKLLKKIPPPKFKKLAKKF

SEQ ID NO: 3355 - protein, 20 aa, Artificial
  Short Peptide
KWKLLKKIPPPKFKKLAKKF

SEQ ID NO: 3356 - protein, 20 aa, Artificial
  Short Peptide
RWKLLKKIPPPKFKKLAKKF

SEQ ID NO: 3357 - protein, 20 aa, Artificial
  Short Peptide
FWKLLKKIPPPKFKKLAKKF

SEQ ID NO: 3358 - protein, 20 aa, Artificial
  Short Peptide
KKKKLKKIPPPKFKKLAKKF

SEQ ID NO: 3359 - protein, 20 aa, Artificial
  Short Peptide
RKKKLKKIPPPKFKKLAKKF

SEQ ID NO: 3360 - protein, 20 aa, Artificial
  Short Peptide
FKKKLKKIPPPKFKKLAKKF

SEQ ID NO: 3361 - protein, 20 aa, Artificial
  Short Peptide
KWKKLKKIPPPKFKKLAKKF

SEQ ID NO: 3362 - protein, 20 aa, Artificial
  Short Peptide
RWKKLKKIPPPKFKKLAKKF

SEQ ID NO: 3363 - protein, 20 aa, Artificial
  Short Peptide
FWKKLKKIPPPKFKKLAKKF

SEQ ID NO: 3364 - protein, 19 aa, Artificial
  Short Peptide
KKKLFLKIPPKFKKLAKKF

SEQ ID NO: 3365 - protein, 19 aa, Artificial
  Short Peptide
RKKLFLKIPPKFKKLAKKF

SEQ ID NO: 3366 - protein, 19 aa, Artificial
  Short Peptide
FKKLFLKIPPKFKKLAKKF

SEQ ID NO: 3367 - protein, 19 aa, Artificial
  Short Peptide
KWKLFLKIPPKFKKLAKKF

SEQ ID NO: 3368 - protein, 19 aa, Artificial
  Short Peptide
RWKLFLKIPPKFKKLAKKF

SEQ ID NO: 3369 - protein, 19 aa, Artificial
  Short Peptide
FWKLFLKIPPKFKKLAKKF

SEQ ID NO: 3370 - protein, 19 aa, Artificial
  Short Peptide
KKKKFLKIPPKFKKLAKKF

SEQ ID NO: 3371 - protein, 19 aa, Artificial
  Short Peptide
RKKKFLKIPPKFKKLAKKF

SEQ ID NO: 3372 - protein, 19 aa, Artificial
  Short Peptide
FKKKFLKIPPKFKKLAKKF

SEQ ID NO: 3373 - protein, 19 aa, Artificial
  Short Peptide
KWKKFLKIPPKFKKLAKKF

SEQ ID NO: 3374 - protein, 19 aa, Artificial
  Short Peptide
RWKKFLKIPPKFKKLAKKF

SEQ ID NO: 3375 - protein, 19 aa, Artificial
  Short Peptide
FWKKFLKIPPKFKKLAKKF

SEQ ID NO: 3376 - protein, 19 aa, Artificial
  Short Peptide
KKKLLLKIPPKFKKLAKKF

SEQ ID NO: 3377 - protein, 19 aa, Artificial
  Short Peptide
RKKLLLKIPPKFKKLAKKF

SEQ ID NO: 3378 - protein, 19 aa, Artificial
  Short Peptide
FKKLLLKIPPKFKKLAKKF

SEQ ID NO: 3379 - protein, 19 aa, Artificial
  Short Peptide
KWKLLLKIPPKFKKLAKKF

SEQ ID NO: 3380 - protein, 19 aa, Artificial
  Short Peptide
RWKLLLKIPPKFKKLAKKF

SEQ ID NO: 3381 - protein, 19 aa, Artificial
  Short Peptide
FWKLLLKIPPKFKKLAKKF

SEQ ID NO: 3382 - protein, 19 aa, Artificial
  Short Peptide
KKKKLLKIPPKFKKLAKKF

SEQ ID NO: 3383 - protein, 19 aa, Artificial
  Short Peptide
RKKKLLKIPPKFKKLAKKF

SEQ ID NO: 3384 - protein, 19 aa, Artificial
  Short Peptide
FKKKLLKIPPKFKKLAKKF

SEQ ID NO: 3385 - protein, 19 aa, Artificial
  Short Peptide
KWKKLLKIPPKFKKLAKKF

SEQ ID NO: 3386 - protein, 19 aa, Artificial
  Short Peptide
RWKKLLKIPPKFKKLAKKF

SEQ ID NO: 3387 - protein, 19 aa, Artificial
  Short Peptide
FWKKLLKIPPKFKKLAKKF

SEQ ID NO: 3388 - protein, 19 aa, Artificial
  Short Peptide
KKKLFKKIPPKFKKLAKKF

SEQ ID NO: 3389 - protein, 19 aa, Artificial
  Short Peptide
RKKLFKKIPPKFKKLAKKF

SEQ ID NO: 3390 - protein, 19 aa, Artificial
  Short Peptide
FKKLFKKIPPKFKKLAKKF

SEQ ID NO: 3391 - protein, 19 aa, Artificial
  Short Peptide
KWKLFKKIPPKFKKLAKKF

SEQ ID NO: 3392 - protein, 19 aa, Artificial
  Short Peptide
RWKLFKKIPPKFKKLAKKF

SEQ ID NO: 3393 - protein, 19 aa, Artificial
  Short Peptide
FWKLFKKIPPKFKKLAKKF

SEQ ID NO: 3394 - protein, 19 aa, Artificial
  Short Peptide
KKKKFKKIPPKFKKLAKKF

SEQ ID NO: 3395 - protein, 19 aa, Artificial
  Short Peptide
RKKKFKKIPPKFKKLAKKF

SEQ ID NO: 3396 - protein, 19 aa, Artificial
  Short Peptide
FKKKFKKIPPKFKKLAKKF

SEQ ID NO: 3397 - protein, 19 aa, Artificial
  Short Peptide
KWKKFKKIPPKFKKLAKKF

SEQ ID NO: 3398 - protein, 19 aa, Artificial
  Short Peptide
RWKKFKKIPPKFKKLAKKF

SEQ ID NO: 3399 - protein, 19 aa, Artificial
  Short Peptide
FWKKFKKIPPKFKKLAKKF

SEQ ID NO: 3400 - protein, 19 aa, Artificial
  Short Peptide
KKKLLKKIPPKFKKLAKKF

SEQ ID NO: 3401 - protein, 19 aa, Artificial
  Short Peptide
RKKLLKKIPPKFKKLAKKF

SEQ ID NO: 3402 - protein, 19 aa, Artificial
  Short Peptide
FKKLLKKIPPKFKKLAKKF

SEQ ID NO: 3403 - protein, 19 aa, Artificial
  Short Peptide
KWKLLKKIPPKFKKLAKKF

SEQ ID NO: 3404 - protein, 19 aa, Artificial
  Short Peptide
RWKLLKKIPPKFKKLAKKF

SEQ ID NO: 3405 - protein, 19 aa, Artificial
  Short Peptide
FWKLLKKIPPKFKKLAKKF

SEQ ID NO: 3406 - protein, 19 aa, Artificial
  Short Peptide
KKKKLKKIPPKFKKLAKKF

SEQ ID NO: 3407 - protein, 19 aa, Artificial
  Short Peptide
RKKKLKKIPPKFKKLAKKF

SEQ ID NO: 3408 - protein, 19 aa, Artificial
  Short Peptide
FKKKLKKIPPKFKKLAKKF

SEQ ID NO: 3409 - protein, 19 aa, Artificial
  Short Peptide
KWKKLKKIPPKFKKLAKKF

SEQ ID NO: 3410 - protein, 19 aa, Artificial
  Short Peptide
RWKKLKKIPPKFKKLAKKF

SEQ ID NO: 3411 - protein, 19 aa, Artificial
  Short Peptide
FWKKLKKIPPKFKKLAKKF

SEQ ID NO: 3412 - protein, 18 aa, Artificial
  Short Peptide
KKKLFLKIPKFKKLAKKF

SEQ ID NO: 3413 - protein, 18 aa, Artificial
  Short Peptide
RKKLFLKIPKFKKLAKKF

SEQ ID NO: 3414 - protein, 18 aa, Artificial
  Short Peptide
FKKLFLKIPKFKKLAKKF

SEQ ID NO: 3415 - protein, 18 aa, Artificial
  Short Peptide
KWKLFLKIPKFKKLAKKF

SEQ ID NO: 3416 - protein, 18 aa, Artificial
  Short Peptide
RWKLFLKIPKFKKLAKKF

SEQ ID NO: 3417 - protein, 18 aa, Artificial
  Short Peptide
FWKLFLKIPKFKKLAKKF

SEQ ID NO: 3418 - protein, 18 aa, Artificial
  Short Peptide
KKKKFLKIPKFKKLAKKF

SEQ ID NO: 3419 - protein, 18 aa, Artificial
  Short Peptide
RKKKFLKIPKFKKLAKKF

SEQ ID NO: 3420 - protein, 18 aa, Artificial
  Short Peptide
FKKKFLKIPKFKKLAKKF

SEQ ID NO: 3421 - protein, 18 aa, Artificial
  Short Peptide
KWKKFLKIPKFKKLAKKF

SEQ ID NO: 3422 - protein, 18 aa, Artificial
  Short Peptide
RWKKFLKIPKFKKLAKKF

SEQ ID NO: 3423 - protein, 18 aa, Artificial
  Short Peptide
FWKKFLKIPKFKKLAKKF

SEQ ID NO: 3424 - protein, 18 aa, Artificial
  Short Peptide
KKKLLLKIPKFKKLAKKF

SEQ ID NO: 3425 - protein, 18 aa, Artificial
  Short Peptide
RKKLLLKIPKFKKLAKKF

SEQ ID NO: 3426 - protein, 18 aa, Artificial
  Short Peptide
FKKLLLKIPKFKKLAKKF

SEQ ID NO: 3427 - protein, 18 aa, Artificial
  Short Peptide
KWKLLLKIPKFKKLAKKF

SEQ ID NO: 3428 - protein, 18 aa, Artificial
  Short Peptide
RWKLLLKIPKFKKLAKKF

SEQ ID NO: 3429 - protein, 18 aa, Artificial
  Short Peptide
FWKLLLKIPKFKKLAKKF

SEQ ID NO: 3430 - protein, 18 aa, Artificial
  Short Peptide
KKKKLLKIPKFKKLAKKF

SEQ ID NO: 3431 - protein, 18 aa, Artificial
  Short Peptide
RKKKLLKIPKFKKLAKKF

SEQ ID NO: 3432 - protein, 18 aa, Artificial
  Short Peptide
FKKKLLKIPKFKKLAKKF

SEQ ID NO: 3433 - protein, 18 aa, Artificial
  Short Peptide
KWKKLLKIPKFKKLAKKF

SEQ ID NO: 3434 - protein, 18 aa, Artificial
  Short Peptide
RWKKLLKIPKFKKLAKKF

SEQ ID NO: 3435 - protein, 18 aa, Artificial
  Short Peptide
FWKKLLKIPKFKKLAKKF

SEQ ID NO: 3436 - protein, 18 aa, Artificial
  Short Peptide
KKKLFKKIPKFKKLAKKF

SEQ ID NO: 3437 - protein, 18 aa, Artificial
  Short Peptide
RKKLFKKIPKFKKLAKKF

SEQ ID NO: 3438 - protein, 18 aa, Artificial
  Short Peptide
FKKLFKKIPKFKKLAKKF

SEQ ID NO: 3439 - protein, 18 aa, Artificial
  Short Peptide
KWKLFKKIPKFKKLAKKF

SEQ ID NO: 3440 - protein, 18 aa, Artificial
  Short Peptide
RWKLFKKIPKFKKLAKKF

SEQ ID NO: 3441 - protein, 18 aa, Artificial
  Short Peptide
FWKLFKKIPKFKKLAKKF

SEQ ID NO: 3442 - protein, 18 aa, Artificial
  Short Peptide
KKKKFKKIPKFKKLAKKF

SEQ ID NO: 3443 - protein, 18 aa, Artificial
  Short Peptide
RKKKFKKIPKFKKLAKKF

SEQ ID NO: 3444 - protein, 18 aa, Artificial
  Short Peptide
FKKKFKKIPKFKKLAKKF

SEQ ID NO: 3445 - protein, 18 aa, Artificial
  Short Peptide
KWKKFKKIPKFKKLAKKF

SEQ ID NO: 3446 - protein, 18 aa, Artificial
  Short Peptide
RWKKFKKIPKFKKLAKKF

SEQ ID NO: 3447 - protein, 18 aa, Artificial
  Short Peptide
FWKKFKKIPKFKKLAKKF

SEQ ID NO: 3448 - protein, 18 aa, Artificial
  Short Peptide
KKKLLKKIPKFKKLAKKF

SEQ ID NO: 3449 - protein, 18 aa, Artificial
  Short Peptide
RKKLLKKIPKFKKLAKKF

SEQ ID NO: 3450 - protein, 18 aa, Artificial
  Short Peptide
FKKLLKKIPKFKKLAKKF

SEQ ID NO: 3451 - protein, 18 aa, Artificial
  Short Peptide
KWKLLKKIPKFKKLAKKF

SEQ ID NO: 3452 - protein, 18 aa, Artificial
  Short Peptide
RWKLLKKIPKFKKLAKKF

SEQ ID NO: 3453 - protein, 18 aa, Artificial
  Short Peptide
FWKLLKKIPKFKKLAKKF

SEQ ID NO: 3454 - protein, 18 aa, Artificial
  Short Peptide
KKKKLKKIPKFKKLAKKF

SEQ ID NO: 3455 - protein, 18 aa, Artificial
  Short Peptide
RKKKLKKIPKFKKLAKKF

SEQ ID NO: 3456 - protein, 18 aa, Artificial
  Short Peptide
FKKKLKKIPKFKKLAKKF

SEQ ID NO: 3457 - protein, 18 aa, Artificial
  Short Peptide
KWKKLKKIPKFKKLAKKF

SEQ ID NO: 3458 - protein, 18 aa, Artificial
  Short Peptide
RWKKLKKIPKFKKLAKKF

SEQ ID NO: 3459 - protein, 18 aa, Artificial
  Short Peptide
FWKKLKKIPKFKKLAKKF

SEQ ID NO: 3460 - protein, 20 aa, Artificial
  Short Peptide
KKKLFLKIPPPKFLHVAKKF

SEQ ID NO: 3461 - protein, 20 aa, Artificial
  Short Peptide
RKKLFLKIPPPKFLHVAKKF

SEQ ID NO: 3462 - protein, 20 aa, Artificial
  Short Peptide
FKKLFLKIPPPKFLHVAKKF

SEQ ID NO: 3463 - protein, 20 aa, Artificial
  Short Peptide
KWKLFLKIPPPKFLHVAKKF

SEQ ID NO: 3464 - protein, 20 aa, Artificial
  Short Peptide
RWKLFLKIPPPKFLHVAKKF

SEQ ID NO: 3465 - protein, 20 aa, Artificial
  Short Peptide
FWKLFLKIPPPKFLHVAKKF

SEQ ID NO: 3466 - protein, 20 aa, Artificial
  Short Peptide
KKKKFLKIPPPKFLHVAKKF

SEQ ID NO: 3467 - protein, 20 aa, Artificial
  Short Peptide
RKKKFLKIPPPKFLHVAKKF

SEQ ID NO: 3468 - protein, 20 aa, Artificial
  Short Peptide
FKKKFLKIPPPKFLHVAKKF

SEQ ID NO: 3469 - protein, 20 aa, Artificial
  Short Peptide
KWKKFLKIPPPKFLHVAKKF

SEQ ID NO: 3470 - protein, 20 aa, Artificial
  Short Peptide
RWKKFLKIPPPKFLHVAKKF

SEQ ID NO: 3471 - protein, 20 aa, Artificial
  Short Peptide
FWKKFLKIPPPKFLHVAKKF

SEQ ID NO: 3472 - protein, 20 aa, Artificial
  Short Peptide
KKKLLLKIPPPKFLHVAKKF

SEQ ID NO: 3473 - protein, 20 aa, Artificial
  Short Peptide
RKKLLLKIPPPKFLHVAKKF

SEQ ID NO: 3474 - protein, 20 aa, Artificial
  Short Peptide
FKKLLLKIPPPKFLHVAKKF

SEQ ID NO: 3475 - protein, 20 aa, Artificial
  Short Peptide
KWKLLLKIPPPKFLHVAKKF

SEQ ID NO: 3476 - protein, 20 aa, Artificial
  Short Peptide
RWKLLLKIPPPKFLHVAKKF

SEQ ID NO: 3477 - protein, 20 aa, Artificial
  Short Peptide
FWKLLLKIPPPKFLHVAKKF

SEQ ID NO: 3478 - protein, 20 aa, Artificial
  Short Peptide
KKKKLLKIPPPKFLHVAKKF

SEQ ID NO: 3479 - protein, 20 aa, Artificial
  Short Peptide
RKKKLLKIPPPKFLHVAKKF

SEQ ID NO: 3480 - protein, 20 aa, Artificial
  Short Peptide
FKKKLLKIPPPKFLHVAKKF

SEQ ID NO: 3481 - protein, 20 aa, Artificial
  Short Peptide
KWKKLLKIPPPKFLHVAKKF

SEQ ID NO: 3482 - protein, 20 aa, Artificial
  Short Peptide
RWKKLLKIPPPKFLHVAKKF

SEQ ID NO: 3483 - protein, 20 aa, Artificial
  Short Peptide
FWKKLLKIPPPKFLHVAKKF

SEQ ID NO: 3484 - protein, 20 aa, Artificial
  Short Peptide
KKKLFKKIPPPKFLHVAKKF

SEQ ID NO: 3485 - protein, 20 aa, Artificial
  Short Peptide
RKKLFKKIPPPKFLHVAKKF

SEQ ID NO: 3486 - protein, 20 aa, Artificial
  Short Peptide
FKKLFKKIPPPKFLHVAKKF

SEQ ID NO: 3487 - protein, 20 aa, Artificial
  Short Peptide
KWKLFKKIPPPKFLHVAKKF

SEQ ID NO: 3488 - protein, 20 aa, Artificial
  Short Peptide
RWKLFKKIPPPKFLHVAKKF

SEQ ID NO: 3489 - protein, 20 aa, Artificial
  Short Peptide
FWKLFKKIPPPKFLHVAKKF

SEQ ID NO: 3490 - protein, 20 aa, Artificial
  Short Peptide
KKKKFKKIPPPKFLHVAKKF

SEQ ID NO: 3491 - protein, 20 aa, Artificial
  Short Peptide
RKKKFKKIPPPKFLHVAKKF

SEQ ID NO: 3492 - protein, 20 aa, Artificial
  Short Peptide
FKKKFKKIPPPKFLHVAKKF

SEQ ID NO: 3493 - protein, 20 aa, Artificial
  Short Peptide
KWKKFKKIPPPKFLHVAKKF

SEQ ID NO: 3494 - protein, 20 aa, Artificial
  Short Peptide
RWKKFKKIPPPKFLHVAKKF

SEQ ID NO: 3495 - protein, 20 aa, Artificial
  Short Peptide
FWKKFKKIPPPKFLHVAKKF

SEQ ID NO: 3496 - protein, 20 aa, Artificial
  Short Peptide
KKKLLKKIPPPKFLHVAKKF

SEQ ID NO: 3497 - protein, 20 aa, Artificial
  Short Peptide
RKKLLKKIPPPKFLHVAKKF

SEQ ID NO: 3498 - protein, 20 aa, Artificial
  Short Peptide
FKKLLKKIPPPKFLHVAKKF

SEQ ID NO: 3499 - protein, 20 aa, Artificial
  Short Peptide
KWKLLKKIPPPKFLHVAKKF

SEQ ID NO: 3500 - protein, 20 aa, Artificial
  Short Peptide
RWKLLKKIPPPKFLHVAKKF

SEQ ID NO: 3501 - protein, 20 aa, Artificial
  Short Peptide
FWKLLKKIPPPKFLHVAKKF

SEQ ID NO: 3502 - protein, 20 aa, Artificial
  Short Peptide
KKKKLKKIPPPKFLHVAKKF

SEQ ID NO: 3503 - protein, 20 aa, Artificial
  Short Peptide
RKKKLKKIPPPKFLHVAKKF

SEQ ID NO: 3504 - protein, 20 aa, Artificial
  Short Peptide
FKKKLKKIPPPKFLHVAKKF

SEQ ID NO: 3505 - protein, 20 aa, Artificial
  Short Peptide
KWKKLKKIPPPKFLHVAKKF

SEQ ID NO: 3506 - protein, 20 aa, Artificial
  Short Peptide
RWKKLKKIPPPKFLHVAKKF

SEQ ID NO: 3507 - protein, 20 aa, Artificial
  Short Peptide
FWKKLKKIPPPKFLHVAKKF

SEQ ID NO: 3508 - protein, 19 aa, Artificial
  Short Peptide
KKKLFLKIPPKFLHVAKKF

SEQ ID NO: 3509 - protein, 19 aa, Artificial
  Short Peptide
RKKLFLKIPPKFLHVAKKF

SEQ ID NO: 3510 - protein, 19 aa, Artificial
  Short Peptide
FKKLFLKIPPKFLHVAKKF

SEQ ID NO: 3511 - protein, 19 aa, Artificial
  Short Peptide
KWKLFLKIPPKFLHVAKKF

SEQ ID NO: 3512 - protein, 19 aa, Artificial
  Short Peptide
RWKLFLKIPPKFLHVAKKF

SEQ ID NO: 3513 - protein, 19 aa, Artificial
  Short Peptide
FWKLFLKIPPKFLHVAKKF

SEQ ID NO: 3514 - protein, 19 aa, Artificial
  Short Peptide
KKKKFLKIPPKFLHVAKKF

SEQ ID NO: 3515 - protein, 19 aa, Artificial
  Short Peptide
RKKKFLKIPPKFLHVAKKF

SEQ ID NO: 3516 - protein, 19 aa, Artificial
  Short Peptide
FKKKFLKIPPKFLHVAKKF

SEQ ID NO: 3517 - protein, 19 aa, Artificial
  Short Peptide
KWKKFLKIPPKFLHVAKKF

SEQ ID NO: 3518 - protein, 19 aa, Artificial
  Short Peptide
RWKKFLKIPPKFLHVAKKF

SEQ ID NO: 3519 - protein, 19 aa, Artificial
  Short Peptide
FWKKFLKIPPKFLHVAKKF

SEQ ID NO: 3520 - protein, 19 aa, Artificial
  Short Peptide
KKKLLLKIPPKFLHVAKKF

SEQ ID NO: 3521 - protein, 19 aa, Artificial
  Short Peptide
RKKLLLKIPPKFLHVAKKF

SEQ ID NO: 3522 - protein, 19 aa, Artificial
  Short Peptide
FKKLLLKIPPKFLHVAKKF

SEQ ID NO: 3523 - protein, 19 aa, Artificial
  Short Peptide
KWKLLLKIPPKFLHVAKKF

SEQ ID NO: 3524 - protein, 19 aa, Artificial
  Short Peptide
RWKLLLKIPPKFLHVAKKF

SEQ ID NO: 3525 - protein, 19 aa, Artificial
  Short Peptide
FWKLLLKIPPKFLHVAKKF

SEQ ID NO: 3526 - protein, 19 aa, Artificial
  Short Peptide
KKKKLLKIPPKFLHVAKKF

SEQ ID NO: 3527 - protein, 19 aa, Artificial
  Short Peptide
RKKKLLKIPPKFLHVAKKF

SEQ ID NO: 3528 - protein, 19 aa, Artificial
  Short Peptide
FKKKLLKIPPKFLHVAKKF

SEQ ID NO: 3529 - protein, 19 aa, Artificial
  Short Peptide
KWKKLLKIPPKFLHVAKKF

SEQ ID NO: 3530 - protein, 19 aa, Artificial
  Short Peptide
RWKKLLKIPPKFLHVAKKF

SEQ ID NO: 3531 - protein, 19 aa, Artificial
  Short Peptide
FWKKLLKIPPKFLHVAKKF

SEQ ID NO: 3532 - protein, 19 aa, Artificial
  Short Peptide
KKKLFKKIPPKFLHVAKKF

SEQ ID NO: 3533 - protein, 19 aa, Artificial
  Short Peptide
RKKLFKKIPPKFLHVAKKF

SEQ ID NO: 3534 - protein, 19 aa, Artificial
  Short Peptide
FKKLFKKIPPKFLHVAKKF

SEQ ID NO: 3535 - protein, 19 aa, Artificial
  Short Peptide
KWKLFKKIPPKFLHVAKKF

SEQ ID NO: 3536 - protein, 19 aa, Artificial
  Short Peptide
RWKLFKKIPPKFLHVAKKF

SEQ ID NO: 3537 - protein, 19 aa, Artificial
  Short Peptide
FWKLFKKIPPKFLHVAKKF

SEQ ID NO: 3538 - protein, 19 aa, Artificial
  Short Peptide
KKKKFKKIPPKFLHVAKKF

SEQ ID NO: 3539 - protein, 19 aa, Artificial
  Short Peptide
RKKKFKKIPPKFLHVAKKF

SEQ ID NO: 3540 - protein, 19 aa, Artificial
  Short Peptide
FKKKFKKIPPKFLHVAKKF

SEQ ID NO: 3541 - protein, 19 aa, Artificial
  Short Peptide
KWKKFKKIPPKFLHVAKKF

SEQ ID NO: 3542 - protein, 19 aa, Artificial
  Short Peptide
RWKKFKKIPPKFLHVAKKF

SEQ ID NO: 3543 - protein, 19 aa, Artificial
  Short Peptide
FWKKFKKIPPKFLHVAKKF

SEQ ID NO: 3544 - protein, 19 aa, Artificial
  Short Peptide
KKKLLKKIPPKFLHVAKKF

SEQ ID NO: 3545 - protein, 19 aa, Artificial
  Short Peptide
RKKLLKKIPPKFLHVAKKF

SEQ ID NO: 3546 - protein, 19 aa, Artificial
  Short Peptide
FKKLLKKIPPKFLHVAKKF

SEQ ID NO: 3547 - protein, 19 aa, Artificial
  Short Peptide
KWKLLKKIPPKFLHVAKKF

SEQ ID NO: 3548 - protein, 19 aa, Artificial
  Short Peptide
RWKLLKKIPPKFLHVAKKF

SEQ ID NO: 3549 - protein, 19 aa, Artificial
  Short Peptide
FWKLLKKIPPKFLHVAKKF

SEQ ID NO: 3550 - protein, 19 aa, Artificial
  Short Peptide
KKKKLKKIPPKFLHVAKKF

SEQ ID NO: 3551 - protein, 19 aa, Artificial
  Short Peptide
RKKKLKKIPPKFLHVAKKF

SEQ ID NO: 3552 - protein, 19 aa, Artificial
  Short Peptide
FKKKLKKIPPKFLHVAKKF

SEQ ID NO: 3553 - protein, 19 aa, Artificial
  Short Peptide
KWKKLKKIPPKFLHVAKKF

SEQ ID NO: 3554 - protein, 19 aa, Artificial
  Short Peptide
RWKKLKKIPPKFLHVAKKF

SEQ ID NO: 3555 - protein, 19 aa, Artificial
  Short Peptide
FWKKLKKIPPKFLHVAKKF

SEQ ID NO: 3556 - protein, 18 aa, Artificial
  Short Peptide
KKKLFLKIPKFLHVAKKF

SEQ ID NO: 3557 - protein, 18 aa, Artificial
  Short Peptide
RKKLFLKIPKFLHVAKKF

SEQ ID NO: 3558 - protein, 18 aa, Artificial
  Short Peptide
FKKLFLKIPKFLHVAKKF

SEQ ID NO: 3559 - protein, 18 aa, Artificial
  Short Peptide
KWKLFLKIPKFLHVAKKF

SEQ ID NO: 3560 - protein, 18 aa, Artificial
  Short Peptide
RWKLFLKIPKFLHVAKKF

SEQ ID NO: 3561 - protein, 18 aa, Artificial
  Short Peptide
FWKLFLKIPKFLHVAKKF

SEQ ID NO: 3562 - protein, 18 aa, Artificial
  Short Peptide
KKKKFLKIPKFLHVAKKF

SEQ ID NO: 3563 - protein, 18 aa, Artificial
  Short Peptide
RKKKFLKIPKFLHVAKKF

SEQ ID NO: 3564 - protein, 18 aa, Artificial
  Short Peptide
FKKKFLKIPKFLHVAKKF

SEQ ID NO: 3565 - protein, 18 aa, Artificial
  Short Peptide
KWKKFLKIPKFLHVAKKF

SEQ ID NO: 3566 - protein, 18 aa, Artificial
  Short Peptide
RWKKFLKIPKFLHVAKKF

SEQ ID NO: 3567 - protein, 18 aa, Artificial
  Short Peptide
FWKKFLKIPKFLHVAKKF

SEQ ID NO: 3568 - protein, 18 aa, Artificial
  Short Peptide
KKKLLLKIPKFLHVAKKF

SEQ ID NO: 3569 - protein, 18 aa, Artificial
  Short Peptide
RKKLLLKIPKFLHVAKKF

SEQ ID NO: 3570 - protein, 18 aa, Artificial
  Short Peptide
FKKLLLKIPKFLHVAKKF

SEQ ID NO: 3571 - protein, 18 aa, Artificial
  Short Peptide
KWKLLLKIPKFLHVAKKF

SEQ ID NO: 3572 - protein, 18 aa, Artificial
  Short Peptide
RWKLLLKIPKFLHVAKKF

SEQ ID NO: 3573 - protein, 18 aa, Artificial
  Short Peptide
FWKLLLKIPKFLHVAKKF

SEQ ID NO: 3574 - protein, 18 aa, Artificial
  Short Peptide
KKKKLLKIPKFLHVAKKF

SEQ ID NO: 3575 - protein, 18 aa, Artificial
  Short Peptide
RKKKLLKIPKFLHVAKKF

SEQ ID NO: 3576 - protein, 18 aa, Artificial
  Short Peptide
FKKKLLKIPKFLHVAKKF

SEQ ID NO: 3577 - protein, 18 aa, Artificial
  Short Peptide
KWKKLLKIPKFLHVAKKF

SEQ ID NO: 3578 - protein, 18 aa, Artificial
  Short Peptide
RWKKLLKIPKFLHVAKKF

SEQ ID NO: 3579 - protein, 18 aa, Artificial
  Short Peptide
FWKKLLKIPKFLHVAKKF

SEQ ID NO: 3580 - protein, 18 aa, Artificial
  Short Peptide
KKKLFKKIPKFLHVAKKF

SEQ ID NO: 3581 - protein, 18 aa, Artificial
  Short Peptide
RKKLFKKIPKFLHVAKKF

SEQ ID NO: 3582 - protein, 18 aa, Artificial
  Short Peptide
FKKLFKKIPKFLHVAKKF

SEQ ID NO: 3583 - protein, 18 aa, Artificial
  Short Peptide
KWKLFKKIPKFLHVAKKF

SEQ ID NO: 3584 - protein, 18 aa, Artificial
  Short Peptide
RWKLFKKIPKFLHVAKKF

SEQ ID NO: 3585 - protein, 18 aa, Artificial
  Short Peptide
FWKLFKKIPKFLHVAKKF

SEQ ID NO: 3586 - protein, 18 aa, Artificial
  Short Peptide
KKKKFKKIPKFLHVAKKF

SEQ ID NO: 3587 - protein, 18 aa, Artificial
  Short Peptide
RKKKFKKIPKFLHVAKKF

SEQ ID NO: 3588 - protein, 18 aa, Artificial
  Short Peptide
FKKKFKKIPKFLHVAKKF

SEQ ID NO: 3589 - protein, 18 aa, Artificial
  Short Peptide
KWKKFKKIPKFLHVAKKF

SEQ ID NO: 3590 - protein, 18 aa, Artificial
  Short Peptide
RWKKFKKIPKFLHVAKKF

SEQ ID NO: 3591 - protein, 18 aa, Artificial
  Short Peptide
FWKKFKKIPKFLHVAKKF

SEQ ID NO: 3592 - protein, 18 aa, Artificial
  Short Peptide
KKKLLKKIPKFLHVAKKF

SEQ ID NO: 3593 - protein, 18 aa, Artificial
  Short Peptide
RKKLLKKIPKFLHVAKKF

SEQ ID NO: 3594 - protein, 18 aa, Artificial
  Short Peptide
FKKLLKKIPKFLHVAKKF

SEQ ID NO: 3595 - protein, 18 aa, Artificial
  Short Peptide
KWKLLKKIPKFLHVAKKF

SEQ ID NO: 3596 - protein, 18 aa, Artificial
  Short Peptide
RWKLLKKIPKFLHVAKKF

SEQ ID NO: 3597 - protein, 18 aa, Artificial
  Short Peptide
FWKLLKKIPKFLHVAKKF

SEQ ID NO: 3598 - protein, 18 aa, Artificial
  Short Peptide
KKKKLKKIPKFLHVAKKF

SEQ ID NO: 3599 - protein, 18 aa, Artificial
  Short Peptide
RKKKLKKIPKFLHVAKKF

SEQ ID NO: 3600 - protein, 18 aa, Artificial
  Short Peptide
FKKKLKKIPKFLHVAKKF

SEQ ID NO: 3601 - protein, 18 aa, Artificial
  Short Peptide
KWKKLKKIPKFLHVAKKF

SEQ ID NO: 3602 - protein, 18 aa, Artificial
  Short Peptide
RWKKLKKIPKFLHVAKKF

SEQ ID NO: 3603 - protein, 18 aa, Artificial
  Short Peptide
FWKKLKKIPKFLHVAKKF

SEQ ID NO: 3604 - protein, 20 aa, Artificial
  Short Peptide
KKKLFLKIPPPKFKHVAKKF

SEQ ID NO: 3605 - protein, 20 aa, Artificial
  Short Peptide
RKKLFLKIPPPKFKHVAKKF

SEQ ID NO: 3606 - protein, 20 aa, Artificial
  Short Peptide
FKKLFLKIPPPKFKHVAKKF

SEQ ID NO: 3607 - protein, 20 aa, Artificial
  Short Peptide
KWKLFLKIPPPKFKHVAKKF

SEQ ID NO: 3608 - protein, 20 aa, Artificial
  Short Peptide
RWKLFLKIPPPKFKHVAKKF

SEQ ID NO: 3609 - protein, 20 aa, Artificial
  Short Peptide
FWKLFLKIPPPKFKHVAKKF

SEQ ID NO: 3610 - protein, 20 aa, Artificial
  Short Peptide
KKKKFLKIPPPKFKHVAKKF

SEQ ID NO: 3611 - protein, 20 aa, Artificial
  Short Peptide
RKKKFLKIPPPKFKHVAKKF

SEQ ID NO: 3612 - protein, 20 aa, Artificial
  Short Peptide
FKKKFLKIPPPKFKHVAKKF

SEQ ID NO: 3613 - protein, 20 aa, Artificial
  Short Peptide
KWKKFLKIPPPKFKHVAKKF

SEQ ID NO: 3614 - protein, 20 aa, Artificial
  Short Peptide
RWKKFLKIPPPKFKHVAKKF

SEQ ID NO: 3615 - protein, 20 aa, Artificial
  Short Peptide
FWKKFLKIPPPKFKHVAKKF

SEQ ID NO: 3616 - protein, 20 aa, Artificial
  Short Peptide
KKKLLLKIPPPKFKHVAKKF

SEQ ID NO: 3617 - protein, 20 aa, Artificial
  Short Peptide
RKKLLLKIPPPKFKHVAKKF

SEQ ID NO: 3618 - protein, 20 aa, Artificial
  Short Peptide
FKKLLLKIPPPKFKHVAKKF

SEQ ID NO: 3619 - protein, 20 aa, Artificial
  Short Peptide
KWKLLLKIPPPKFKHVAKKF

SEQ ID NO: 3620 - protein, 20 aa, Artificial
  Short Peptide
RWKLLLKIPPPKFKHVAKKF

SEQ ID NO: 3621 - protein, 20 aa, Artificial
  Short Peptide
FWKLLLKIPPPKFKHVAKKF

SEQ ID NO: 3622 - protein, 20 aa, Artificial
  Short Peptide
KKKKLLKIPPPKFKHVAKKF

SEQ ID NO: 3623 - protein, 20 aa, Artificial
  Short Peptide
RKKKLLKIPPPKFKHVAKKF

SEQ ID NO: 3624 - protein, 20 aa, Artificial
  Short Peptide
FKKKLLKIPPPKFKHVAKKF

SEQ ID NO: 3625 - protein, 20 aa, Artificial
  Short Peptide
KWKKLLKIPPPKFKHVAKKF

SEQ ID NO: 3626 - protein, 20 aa, Artificial
  Short Peptide
RWKKLLKIPPPKFKHVAKKF

SEQ ID NO: 3627 - protein, 20 aa, Artificial
  Short Peptide
FWKKLLKIPPPKFKHVAKKF

SEQ ID NO: 3628 - protein, 20 aa, Artificial
  Short Peptide
KKKLFKKIPPPKFKHVAKKF

SEQ ID NO: 3629 - protein, 20 aa, Artificial
  Short Peptide
RKKLFKKIPPPKFKHVAKKF

SEQ ID NO: 3630 - protein, 20 aa, Artificial
  Short Peptide
FKKLFKKIPPPKFKHVAKKF

SEQ ID NO: 3631 - protein, 20 aa, Artificial
  Short Peptide
KWKLFKKIPPPKFKHVAKKF

SEQ ID NO: 3632 - protein, 20 aa, Artificial
  Short Peptide
RWKLFKKIPPPKFKHVAKKF

SEQ ID NO: 3633 - protein, 20 aa, Artificial
  Short Peptide
FWKLFKKIPPPKFKHVAKKF

SEQ ID NO: 3634 - protein, 20 aa, Artificial
  Short Peptide
KKKKFKKIPPPKFKHVAKKF

SEQ ID NO: 3635 - protein, 20 aa, Artificial
  Short Peptide
RKKKFKKIPPPKFKHVAKKF

SEQ ID NO: 3636 - protein, 20 aa, Artificial
  Short Peptide
FKKKFKKIPPPKFKHVAKKF

SEQ ID NO: 3637 - protein, 20 aa, Artificial
  Short Peptide
KWKKFKKIPPPKFKHVAKKF

SEQ ID NO: 3638 - protein, 20 aa, Artificial
  Short Peptide
RWKKFKKIPPPKFKHVAKKF

SEQ ID NO: 3639 - protein, 20 aa, Artificial
  Short Peptide
FWKKFKKIPPPKFKHVAKKF

SEQ ID NO: 3640 - protein, 20 aa, Artificial
  Short Peptide
KKKLLKKIPPPKFKHVAKKF

SEQ ID NO: 3641 - protein, 20 aa, Artificial
  Short Peptide
RKKLLKKIPPPKFKHVAKKF

SEQ ID NO: 3642 - protein, 20 aa, Artificial
  Short Peptide
FKKLLKKIPPPKFKHVAKKF

SEQ ID NO: 3643 - protein, 20 aa, Artificial
  Short Peptide
KWKLLKKIPPPKFKHVAKKF

SEQ ID NO: 3644 - protein, 20 aa, Artificial
  Short Peptide
RWKLLKKIPPPKFKHVAKKF

SEQ ID NO: 3645 - protein, 20 aa, Artificial
  Short Peptide
FWKLLKKIPPPKFKHVAKKF

SEQ ID NO: 3646 - protein, 20 aa, Artificial
  Short Peptide
KKKKLKKIPPPKFKHVAKKF

SEQ ID NO: 3647 - protein, 20 aa, Artificial
  Short Peptide
RKKKLKKIPPPKFKHVAKKF

SEQ ID NO: 3648 - protein, 20 aa, Artificial
  Short Peptide
FKKKLKKIPPPKFKHVAKKF

SEQ ID NO: 3649 - protein, 20 aa, Artificial
  Short Peptide
KWKKLKKIPPPKFKHVAKKF

SEQ ID NO: 3650 - protein, 20 aa, Artificial
  Short Peptide
RWKKLKKIPPPKFKHVAKKF

SEQ ID NO: 3651 - protein, 20 aa, Artificial
  Short Peptide
FWKKLKKIPPPKFKHVAKKF

SEQ ID NO: 3652 - protein, 19 aa, Artificial
  Short Peptide
KKKLFLKIPPKFKHVAKKF

SEQ ID NO: 3653 - protein, 19 aa, Artificial
  Short Peptide
RKKLFLKIPPKFKHVAKKF

SEQ ID NO: 3654 - protein, 19 aa, Artificial
  Short Peptide
FKKLFLKIPPKFKHVAKKF

SEQ ID NO: 3655 - protein, 19 aa, Artificial
  Short Peptide
KWKLFLKIPPKFKHVAKKF

SEQ ID NO: 3656 - protein, 19 aa, Artificial
  Short Peptide
RWKLFLKIPPKFKHVAKKF

SEQ ID NO: 3657 - protein, 19 aa, Artificial
  Short Peptide
FWKLFLKIPPKFKHVAKKF

SEQ ID NO: 3658 - protein, 19 aa, Artificial
  Short Peptide
KKKKFLKIPPKFKHVAKKF

SEQ ID NO: 3659 - protein, 19 aa, Artificial
  Short Peptide
RKKKFLKIPPKFKHVAKKF

SEQ ID NO: 3660 - protein, 19 aa, Artificial
  Short Peptide
FKKKFLKIPPKFKHVAKKF

SEQ ID NO: 3661 - protein, 19 aa, Artificial
  Short Peptide
KWKKFLKIPPKFKHVAKKF

SEQ ID NO: 3662 - protein, 19 aa, Artificial
  Short Peptide
RWKKFLKIPPKFKHVAKKF

SEQ ID NO: 3663 - protein, 19 aa, Artificial
  Short Peptide
FWKKFLKIPPKFKHVAKKF

SEQ ID NO: 3664 - protein, 19 aa, Artificial
  Short Peptide
KKKLLLKIPPKFKHVAKKF

SEQ ID NO: 3665 - protein, 19 aa, Artificial
  Short Peptide
RKKLLLKIPPKFKHVAKKF

SEQ ID NO: 3666 - protein, 19 aa, Artificial
  Short Peptide
FKKLLLKIPPKFKHVAKKF

SEQ ID NO: 3667 - protein, 19 aa, Artificial
  Short Peptide
KWKLLLKIPPKFKHVAKKF

SEQ ID NO: 3668 - protein, 19 aa, Artificial
  Short Peptide
RWKLLLKIPPKFKHVAKKF

SEQ ID NO: 3669 - protein, 19 aa, Artificial
  Short Peptide
FWKLLLKIPPKFKHVAKKF

SEQ ID NO: 3670 - protein, 19 aa, Artificial
  Short Peptide
KKKKLLKIPPKFKHVAKKF

SEQ ID NO: 3671 - protein, 19 aa, Artificial
  Short Peptide
RKKKLLKIPPKFKHVAKKF

SEQ ID NO: 3672 - protein, 19 aa, Artificial
  Short Peptide
FKKKLLKIPPKFKHVAKKF

SEQ ID NO: 3673 - protein, 19 aa, Artificial
  Short Peptide
KWKKLLKIPPKFKHVAKKF

SEQ ID NO: 3674 - protein, 19 aa, Artificial
  Short Peptide
RWKKLLKIPPKFKHVAKKF

SEQ ID NO: 3675 - protein, 19 aa, Artificial
  Short Peptide
FWKKLLKIPPKFKHVAKKF

SEQ ID NO: 3676 - protein, 19 aa, Artificial
  Short Peptide
KKKLFKKIPPKFKHVAKKF

SEQ ID NO: 3677 - protein, 19 aa, Artificial
  Short Peptide
RKKLFKKIPPKFKHVAKKF

SEQ ID NO: 3678 - protein, 19 aa, Artificial
  Short Peptide
FKKLFKKIPPKFKHVAKKF

SEQ ID NO: 3679 - protein, 19 aa, Artificial
  Short Peptide
KWKLFKKIPPKFKHVAKKF

SEQ ID NO: 3680 - protein, 19 aa, Artificial
  Short Peptide
RWKLFKKIPPKFKHVAKKF

SEQ ID NO: 3681 - protein, 19 aa, Artificial
  Short Peptide
FWKLFKKIPPKFKHVAKKF

SEQ ID NO: 3682 - protein, 19 aa, Artificial
  Short Peptide
KKKKFKKIPPKFKHVAKKF

SEQ ID NO: 3683 - protein, 19 aa, Artificial
  Short Peptide
RKKKFKKIPPKFKHVAKKF

SEQ ID NO: 3684 - protein, 19 aa, Artificial
  Short Peptide
FKKKFKKIPPKFKHVAKKF

SEQ ID NO: 3685 - protein, 19 aa, Artificial
  Short Peptide
KWKKFKKIPPKFKHVAKKF

SEQ ID NO: 3686 - protein, 19 aa, Artificial
  Short Peptide
RWKKFKKIPPKFKHVAKKF

SEQ ID NO: 3687 - protein, 19 aa, Artificial
  Short Peptide
FWKKFKKIPPKFKHVAKKF

SEQ ID NO: 3688 - protein, 19 aa, Artificial
  Short Peptide
KKKLLKKIPPKFKHVAKKF

SEQ ID NO: 3689 - protein, 19 aa, Artificial
  Short Peptide
RKKLLKKIPPKFKHVAKKF

SEQ ID NO: 3690 - protein, 19 aa, Artificial
  Short Peptide
FKKLLKKIPPKFKHVAKKF

SEQ ID NO: 3691 - protein, 19 aa, Artificial
  Short Peptide
KWKLLKKIPPKFKHVAKKF

SEQ ID NO: 3692 - protein, 19 aa, Artificial
  Short Peptide
RWKLLKKIPPKFKHVAKKF

SEQ ID NO: 3693 - protein, 19 aa, Artificial
  Short Peptide
FWKLLKKIPPKFKHVAKKF

SEQ ID NO: 3694 - protein, 19 aa, Artificial
  Short Peptide
KKKKLKKIPPKFKHVAKKF

SEQ ID NO: 3695 - protein, 19 aa, Artificial
  Short Peptide
RKKKLKKIPPKFKHVAKKF

SEQ ID NO: 3696 - protein, 19 aa, Artificial
  Short Peptide
FKKKLKKIPPKFKHVAKKF

SEQ ID NO: 3697 - protein, 19 aa, Artificial
  Short Peptide
KWKKLKKIPPKFKHVAKKF

SEQ ID NO: 3698 - protein, 19 aa, Artificial
  Short Peptide
RWKKLKKIPPKFKHVAKKF

SEQ ID NO: 3699 - protein, 19 aa, Artificial
  Short Peptide
FWKKLKKIPPKFKHVAKKF

SEQ ID NO: 3700 - protein, 18 aa, Artificial
  Short Peptide
KKKLFLKIPKFKHVAKKF

SEQ ID NO: 3701 - protein, 18 aa, Artificial
  Short Peptide
RKKLFLKIPKFKHVAKKF

SEQ ID NO: 3702 - protein, 18 aa, Artificial
  Short Peptide
FKKLFLKIPKFKHVAKKF

SEQ ID NO: 3703 - protein, 18 aa, Artificial
  Short Peptide
KWKLFLKIPKFKHVAKKF

SEQ ID NO: 3704 - protein, 18 aa, Artificial
  Short Peptide
RWKLFLKIPKFKHVAKKF

SEQ ID NO: 3705 - protein, 18 aa, Artificial
  Short Peptide
FWKLFLKIPKFKHVAKKF

SEQ ID NO: 3706 - protein, 18 aa, Artificial
  Short Peptide
KKKKFLKIPKFKHVAKKF

SEQ ID NO: 3707 - protein, 18 aa, Artificial
  Short Peptide
RKKKFLKIPKFKHVAKKF

SEQ ID NO: 3708 - protein, 18 aa, Artificial
  Short Peptide
FKKKFLKIPKFKHVAKKF

SEQ ID NO: 3709 - protein, 18 aa, Artificial
  Short Peptide
KWKKFLKIPKFKHVAKKF

SEQ ID NO: 3710 - protein, 18 aa, Artificial
  Short Peptide
RWKKFLKIPKFKHVAKKF

SEQ ID NO: 3711 - protein, 18 aa, Artificial
  Short Peptide
FWKKFLKIPKFKHVAKKF

SEQ ID NO: 3712 - protein, 18 aa, Artificial
  Short Peptide
KKKLLLKIPKFKHVAKKF

SEQ ID NO: 3713 - protein, 18 aa, Artificial
  Short Peptide
RKKLLLKIPKFKHVAKKF

SEQ ID NO: 3714 - protein, 18 aa, Artificial
  Short Peptide
FKKLLLKIPKFKHVAKKF

SEQ ID NO: 3715 - protein, 18 aa, Artificial
  Short Peptide
KWKLLLKIPKFKHVAKKF

SEQ ID NO: 3716 - protein, 18 aa, Artificial
  Short Peptide
RWKLLLKIPKFKHVAKKF

SEQ ID NO: 3717 - protein, 18 aa, Artificial
  Short Peptide
FWKLLLKIPKFKHVAKKF

SEQ ID NO: 3718 - protein, 18 aa, Artificial
  Short Peptide
KKKKLLKIPKFKHVAKKF

SEQ ID NO: 3719 - protein, 18 aa, Artificial
  Short Peptide
RKKKLLKIPKFKHVAKKF

SEQ ID NO: 3720 - protein, 18 aa, Artificial
  Short Peptide
FKKKLLKIPKFKHVAKKF

SEQ ID NO: 3721 - protein, 18 aa, Artificial
  Short Peptide
KWKKLLKIPKFKHVAKKF

SEQ ID NO: 3722 - protein, 18 aa, Artificial
  Short Peptide
RWKKLLKIPKFKHVAKKF

SEQ ID NO: 3723 - protein, 18 aa, Artificial
  Short Peptide
FWKKLLKIPKFKHVAKKF

SEQ ID NO: 3724 - protein, 18 aa, Artificial
  Short Peptide
KKKLFKKIPKFKHVAKKF

SEQ ID NO: 3725 - protein, 18 aa, Artificial
  Short Peptide
RKKLFKKIPKFKHVAKKF

SEQ ID NO: 3726 - protein, 18 aa, Artificial
  Short Peptide
FKKLFKKIPKFKHVAKKF

SEQ ID NO: 3727 - protein, 18 aa, Artificial
  Short Peptide
KWKLFKKIPKFKHVAKKF

SEQ ID NO: 3728 - protein, 18 aa, Artificial
  Short Peptide
RWKLFKKIPKFKHVAKKF

SEQ ID NO: 3729 - protein, 18 aa, Artificial
  Short Peptide
FWKLFKKIPKFKHVAKKF

SEQ ID NO: 3730 - protein, 18 aa, Artificial
  Short Peptide
KKKKFKKIPKFKHVAKKF

SEQ ID NO: 3731 - protein, 18 aa, Artificial
  Short Peptide
RKKKFKKIPKFKHVAKKF

SEQ ID NO: 3732 - protein, 18 aa, Artificial
  Short Peptide
FKKKFKKIPKFKHVAKKF

SEQ ID NO: 3733 - protein, 18 aa, Artificial
  Short Peptide
KWKKFKKIPKFKHVAKKF

SEQ ID NO: 3734 - protein, 18 aa, Artificial
  Short Peptide
RWKKFKKIPKFKHVAKKF

SEQ ID NO: 3735 - protein, 18 aa, Artificial
  Short Peptide
FWKKFKKIPKFKHVAKKF

SEQ ID NO: 3736 - protein, 18 aa, Artificial
  Short Peptide
KKKLLKKIPKFKHVAKKF

SEQ ID NO: 3737 - protein, 18 aa, Artificial
  Short Peptide
RKKLLKKIPKFKHVAKKF

SEQ ID NO: 3738 - protein, 18 aa, Artificial
  Short Peptide
FKKLLKKIPKFKHVAKKF

SEQ ID NO: 3739 - protein, 18 aa, Artificial
  Short Peptide
KWKLLKKIPKFKHVAKKF

SEQ ID NO: 3740 - protein, 18 aa, Artificial
  Short Peptide
RWKLLKKIPKFKHVAKKF

SEQ ID NO: 3741 - protein, 18 aa, Artificial
  Short Peptide
FWKLLKKIPKFKHVAKKF

SEQ ID NO: 3742 - protein, 18 aa, Artificial
  Short Peptide
KKKKLKKIPKFKHVAKKF

SEQ ID NO: 3743 - protein, 18 aa, Artificial
  Short Peptide
RKKKLKKIPKFKHVAKKF

SEQ ID NO: 3744 - protein, 18 aa, Artificial
  Short Peptide
FKKKLKKIPKFKHVAKKF

SEQ ID NO: 3745 - protein, 18 aa, Artificial
  Short Peptide
KWKKLKKIPKFKHVAKKF

SEQ ID NO: 3746 - protein, 18 aa, Artificial
  Short Peptide
RWKKLKKIPKFKHVAKKF

SEQ ID NO: 3747 - protein, 18 aa, Artificial
  Short Peptide
FWKKLKKIPKFKHVAKKF

SEQ ID NO: 3748 - protein, 20 aa, Artificial
  Short Peptide
KKKLFLKIPPPKFLKVAKKF

SEQ ID NO: 3749 - protein, 20 aa, Artificial
  Short Peptide
RKKLFLKIPPPKFLKVAKKF

SEQ ID NO: 3750 - protein, 20 aa, Artificial
  Short Peptide
FKKLFLKIPPPKFLKVAKKF

SEQ ID NO: 3751 - protein, 20 aa, Artificial
  Short Peptide
KWKLFLKIPPPKFLKVAKKF

SEQ ID NO: 3752 - protein, 20 aa, Artificial
  Short Peptide
RWKLFLKIPPPKFLKVAKKF

SEQ ID NO: 3753 - protein, 20 aa, Artificial
  Short Peptide
FWKLFLKIPPPKFLKVAKKF

SEQ ID NO: 3754 - protein, 20 aa, Artificial
  Short Peptide
KKKKFLKIPPPKFLKVAKKF

SEQ ID NO: 3755 - protein, 20 aa, Artificial
  Short Peptide
RKKKFLKIPPPKFLKVAKKF

SEQ ID NO: 3756 - protein, 20 aa, Artificial
  Short Peptide
FKKKFLKIPPPKFLKVAKKF

SEQ ID NO: 3757 - protein, 20 aa, Artificial
  Short Peptide
KWKKFLKIPPPKFLKVAKKF

SEQ ID NO: 3758 - protein, 20 aa, Artificial
  Short Peptide
RWKKFLKIPPPKFLKVAKKF

SEQ ID NO: 3759 - protein, 20 aa, Artificial
  Short Peptide
FWKKFLKIPPPKFLKVAKKF

SEQ ID NO: 3760 - protein, 20 aa, Artificial
  Short Peptide
KKKLLLKIPPPKFLKVAKKF

SEQ ID NO: 3761 - protein, 20 aa, Artificial
  Short Peptide
RKKLLLKIPPPKFLKVAKKF

SEQ ID NO: 3762 - protein, 20 aa, Artificial
  Short Peptide
FKKLLLKIPPPKFLKVAKKF

SEQ ID NO: 3763 - protein, 20 aa, Artificial
  Short Peptide
KWKLLLKIPPPKFLKVAKKF

SEQ ID NO: 3764 - protein, 20 aa, Artificial
  Short Peptide
RWKLLLKIPPPKFLKVAKKF

SEQ ID NO: 3765 - protein, 20 aa, Artificial
  Short Peptide
FWKLLLKIPPPKFLKVAKKF

SEQ ID NO: 3766 - protein, 20 aa, Artificial
  Short Peptide
KKKKLLKIPPPKFLKVAKKF

SEQ ID NO: 3767 - protein, 20 aa, Artificial
  Short Peptide
RKKKLLKIPPPKFLKVAKKF

SEQ ID NO: 3768 - protein, 20 aa, Artificial
  Short Peptide
FKKKLLKIPPPKFLKVAKKF

SEQ ID NO: 3769 - protein, 20 aa, Artificial
  Short Peptide
KWKKLLKIPPPKFLKVAKKF

SEQ ID NO: 3770 - protein, 20 aa, Artificial
  Short Peptide
RWKKLLKIPPPKFLKVAKKF

SEQ ID NO: 3771 - protein, 20 aa, Artificial
  Short Peptide
FWKKLLKIPPPKFLKVAKKF

SEQ ID NO: 3772 - protein, 20 aa, Artificial
  Short Peptide
KKKLFKKIPPPKFLKVAKKF

SEQ ID NO: 3773 - protein, 20 aa, Artificial
  Short Peptide
RKKLFKKIPPPKFLKVAKKF

SEQ ID NO: 3774 - protein, 20 aa, Artificial
  Short Peptide
FKKLFKKIPPPKFLKVAKKF

SEQ ID NO: 3775 - protein, 20 aa, Artificial
  Short Peptide
KWKLFKKIPPPKFLKVAKKF

SEQ ID NO: 3776 - protein, 20 aa, Artificial
  Short Peptide
RWKLFKKIPPPKFLKVAKKF

SEQ ID NO: 3777 - protein, 20 aa, Artificial
  Short Peptide
FWKLFKKIPPPKFLKVAKKF

SEQ ID NO: 3778 - protein, 20 aa, Artificial
  Short Peptide
KKKKFKKIPPPKFLKVAKKF

SEQ ID NO: 3779 - protein, 20 aa, Artificial
  Short Peptide
RKKKFKKIPPPKFLKVAKKF

SEQ ID NO: 3780 - protein, 20 aa, Artificial
  Short Peptide
FKKKFKKIPPPKFLKVAKKF

SEQ ID NO: 3781 - protein, 20 aa, Artificial
  Short Peptide
KWKKFKKIPPPKFLKVAKKF

SEQ ID NO: 3782 - protein, 20 aa, Artificial
  Short Peptide
RWKKFKKIPPPKFLKVAKKF

SEQ ID NO: 3783 - protein, 20 aa, Artificial
  Short Peptide
FWKKFKKIPPPKFLKVAKKF

SEQ ID NO: 3784 - protein, 20 aa, Artificial
  Short Peptide
KKKLLKKIPPPKFLKVAKKF

SEQ ID NO: 3785 - protein, 20 aa, Artificial
  Short Peptide
RKKLLKKIPPPKFLKVAKKF

SEQ ID NO: 3786 - protein, 20 aa, Artificial
  Short Peptide
FKKLLKKIPPPKFLKVAKKF

SEQ ID NO: 3787 - protein, 20 aa, Artificial
  Short Peptide
KWKLLKKIPPPKFLKVAKKF

SEQ ID NO: 3788 - protein, 20 aa, Artificial
  Short Peptide
RWKLLKKIPPPKFLKVAKKF

SEQ ID NO: 3789 - protein, 20 aa, Artificial
  Short Peptide
FWKLLKKIPPPKFLKVAKKF

SEQ ID NO: 3790 - protein, 20 aa, Artificial
  Short Peptide
KKKKLKKIPPPKFLKVAKKF

SEQ ID NO: 3791 - protein, 20 aa, Artificial
  Short Peptide
RKKKLKKIPPPKFLKVAKKF

SEQ ID NO: 3792 - protein, 20 aa, Artificial
  Short Peptide
FKKKLKKIPPPKFLKVAKKF

SEQ ID NO: 3793 - protein, 20 aa, Artificial
  Short Peptide
KWKKLKKIPPPKFLKVAKKF

SEQ ID NO: 3794 - protein, 20 aa, Artificial
  Short Peptide
RWKKLKKIPPPKFLKVAKKF

SEQ ID NO: 3795 - protein, 20 aa, Artificial
  Short Peptide
FWKKLKKIPPPKFLKVAKKF

SEQ ID NO: 3796 - protein, 19 aa, Artificial
  Short Peptide
KKKLFLKIPPKFLKVAKKF

SEQ ID NO: 3797 - protein, 19 aa, Artificial
  Short Peptide
RKKLFLKIPPKFLKVAKKF

SEQ ID NO: 3798 - protein, 19 aa, Artificial
  Short Peptide
FKKLFLKIPPKFLKVAKKF

SEQ ID NO: 3799 - protein, 19 aa, Artificial
  Short Peptide
KWKLFLKIPPKFLKVAKKF

SEQ ID NO: 3800 - protein, 19 aa, Artificial
  Short Peptide
RWKLFLKIPPKFLKVAKKF

SEQ ID NO: 3801 - protein, 19 aa, Artificial
  Short Peptide
FWKLFLKIPPKFLKVAKKF

SEQ ID NO: 3802 - protein, 19 aa, Artificial
  Short Peptide
KKKKFLKIPPKFLKVAKKF

SEQ ID NO: 3803 - protein, 19 aa, Artificial
  Short Peptide
RKKKFLKIPPKFLKVAKKF

SEQ ID NO: 3804 - protein, 19 aa, Artificial
  Short Peptide
FKKKFLKIPPKFLKVAKKF

SEQ ID NO: 3805 - protein, 19 aa, Artificial
  Short Peptide
KWKKFLKIPPKFLKVAKKF

SEQ ID NO: 3806 - protein, 19 aa, Artificial
  Short Peptide
RWKKFLKIPPKFLKVAKKF

SEQ ID NO: 3807 - protein, 19 aa, Artificial
  Short Peptide
FWKKFLKIPPKFLKVAKKF

SEQ ID NO: 3808 - protein, 19 aa, Artificial
  Short Peptide
KKKLLLKIPPKFLKVAKKF

SEQ ID NO: 3809 - protein, 19 aa, Artificial
  Short Peptide
RKKLLLKIPPKFLKVAKKF

SEQ ID NO: 3810 - protein, 19 aa, Artificial
  Short Peptide
FKKLLLKIPPKFLKVAKKF

SEQ ID NO: 3811 - protein, 19 aa, Artificial
  Short Peptide
KWKLLLKIPPKFLKVAKKF

SEQ ID NO: 3812 - protein, 19 aa, Artificial
  Short Peptide
RWKLLLKIPPKFLKVAKKF

SEQ ID NO: 3813 - protein, 19 aa, Artificial
  Short Peptide
FWKLLLKIPPKFLKVAKKF

SEQ ID NO: 3814 - protein, 19 aa, Artificial
  Short Peptide
KKKKLLKIPPKFLKVAKKF

SEQ ID NO: 3815 - protein, 19 aa, Artificial
  Short Peptide
RKKKLLKIPPKFLKVAKKF

SEQ ID NO: 3816 - protein, 19 aa, Artificial
  Short Peptide
FKKKLLKIPPKFLKVAKKF

SEQ ID NO: 3817 - protein, 19 aa, Artificial
  Short Peptide
KWKKLLKIPPKFLKVAKKF

SEQ ID NO: 3818 - protein, 19 aa, Artificial
  Short Peptide
RWKKLLKIPPKFLKVAKKF

SEQ ID NO: 3819 - protein, 19 aa, Artificial
  Short Peptide
FWKKLLKIPPKFLKVAKKF

SEQ ID NO: 3820 - protein, 19 aa, Artificial
  Short Peptide
KKKLFKKIPPKFLKVAKKF

SEQ ID NO: 3821 - protein, 19 aa, Artificial
  Short Peptide
RKKLFKKIPPKFLKVAKKF

SEQ ID NO: 3822 - protein, 19 aa, Artificial
  Short Peptide
FKKLFKKIPPKFLKVAKKF

SEQ ID NO: 3823 - protein, 19 aa, Artificial
  Short Peptide
KWKLFKKIPPKFLKVAKKF

SEQ ID NO: 3824 - protein, 19 aa, Artificial
  Short Peptide
RWKLFKKIPPKFLKVAKKF

SEQ ID NO: 3825 - protein, 19 aa, Artificial
  Short Peptide
FWKLFKKIPPKFLKVAKKF

SEQ ID NO: 3826 - protein, 19 aa, Artificial
  Short Peptide
KKKKFKKIPPKFLKVAKKF

SEQ ID NO: 3827 - protein, 19 aa, Artificial
  Short Peptide
RKKKFKKIPPKFLKVAKKF

SEQ ID NO: 3828 - protein, 19 aa, Artificial
  Short Peptide
FKKKFKKIPPKFLKVAKKF

SEQ ID NO: 3829 - protein, 19 aa, Artificial
  Short Peptide
KWKKFKKIPPKFLKVAKKF

SEQ ID NO: 3830 - protein, 19 aa, Artificial
  Short Peptide
RWKKFKKIPPKFLKVAKKF

SEQ ID NO: 3831 - protein, 19 aa, Artificial
  Short Peptide
FWKKFKKIPPKFLKVAKKF

SEQ ID NO: 3832 - protein, 19 aa, Artificial
  Short Peptide
KKKLLKKIPPKFLKVAKKF

SEQ ID NO: 3833 - protein, 19 aa, Artificial
  Short Peptide
RKKLLKKIPPKFLKVAKKF

SEQ ID NO: 3834 - protein, 19 aa, Artificial
  Short Peptide
FKKLLKKIPPKFLKVAKKF

SEQ ID NO: 3835 - protein, 19 aa, Artificial
  Short Peptide
KWKLLKKIPPKFLKVAKKF

SEQ ID NO: 3836 - protein, 19 aa, Artificial
  Short Peptide
RWKLLKKIPPKFLKVAKKF

SEQ ID NO: 3837 - protein, 19 aa, Artificial
  Short Peptide
FWKLLKKIPPKFLKVAKKF

SEQ ID NO: 3838 - protein, 19 aa, Artificial
  Short Peptide
KKKKLKKIPPKFLKVAKKF

SEQ ID NO: 3839 - protein, 19 aa, Artificial
  Short Peptide
RKKKLKKIPPKFLKVAKKF

SEQ ID NO: 3840 - protein, 19 aa, Artificial
  Short Peptide
FKKKLKKIPPKFLKVAKKF

SEQ ID NO: 3841 - protein, 19 aa, Artificial
  Short Peptide
KWKKLKKIPPKFLKVAKKF

SEQ ID NO: 3842 - protein, 19 aa, Artificial
  Short Peptide
RWKKLKKIPPKFLKVAKKF

SEQ ID NO: 3843 - protein, 19 aa, Artificial
  Short Peptide
FWKKLKKIPPKFLKVAKKF

SEQ ID NO: 3844 - protein, 18 aa, Artificial
  Short Peptide
KKKLFLKIPKFLKVAKKF

SEQ ID NO: 3845 - protein, 18 aa, Artificial
  Short Peptide
RKKLFLKIPKFLKVAKKF

SEQ ID NO: 3846 - protein, 18 aa, Artificial
  Short Peptide
FKKLFLKIPKFLKVAKKF

SEQ ID NO: 3847 - protein, 18 aa, Artificial
  Short Peptide
KWKLFLKIPKFLKVAKKF

SEQ ID NO: 3848 - protein, 18 aa, Artificial
  Short Peptide
RWKLFLKIPKFLKVAKKF

SEQ ID NO: 3849 - protein, 18 aa, Artificial
  Short Peptide
FWKLFLKIPKFLKVAKKF

SEQ ID NO: 3850 - protein, 18 aa, Artificial
  Short Peptide
KKKKFLKIPKFLKVAKKF

SEQ ID NO: 3851 - protein, 18 aa, Artificial
  Short Peptide
RKKKFLKIPKFLKVAKKF

SEQ ID NO: 3852 - protein, 18 aa, Artificial
  Short Peptide
FKKKFLKIPKFLKVAKKF

SEQ ID NO: 3853 - protein, 18 aa, Artificial
  Short Peptide
KWKKFLKIPKFLKVAKKF

SEQ ID NO: 3854 - protein, 18 aa, Artificial
  Short Peptide
RWKKFLKIPKFLKVAKKF

SEQ ID NO: 3855 - protein, 18 aa, Artificial
  Short Peptide
FWKKFLKIPKFLKVAKKF

SEQ ID NO: 3856 - protein, 18 aa, Artificial
  Short Peptide
KKKLLLKIPKFLKVAKKF

SEQ ID NO: 3857 - protein, 18 aa, Artificial
  Short Peptide
RKKLLLKIPKFLKVAKKF

SEQ ID NO: 3858 - protein, 18 aa, Artificial
  Short Peptide
FKKLLLKIPKFLKVAKKF

SEQ ID NO: 3859 - protein, 18 aa, Artificial
  Short Peptide
KWKLLLKIPKFLKVAKKF

SEQ ID NO: 3860 - protein, 18 aa, Artificial
  Short Peptide
RWKLLLKIPKFLKVAKKF

SEQ ID NO: 3861 - protein, 18 aa, Artificial
  Short Peptide
FWKLLLKIPKFLKVAKKF

SEQ ID NO: 3862 - protein, 18 aa, Artificial
  Short Peptide
KKKKLLKIPKFLKVAKKF

SEQ ID NO: 3863 - protein, 18 aa, Artificial
  Short Peptide
RKKKLLKIPKFLKVAKKF

SEQ ID NO: 3864 - protein, 18 aa, Artificial
  Short Peptide
FKKKLLKIPKFLKVAKKF

SEQ ID NO: 3865 - protein, 18 aa, Artificial
  Short Peptide
KWKKLLKIPKFLKVAKKF

SEQ ID NO: 3866 - protein, 18 aa, Artificial
  Short Peptide
RWKKLLKIPKFLKVAKKF

SEQ ID NO: 3867 - protein, 18 aa, Artificial
  Short Peptide
FWKKLLKIPKFLKVAKKF

SEQ ID NO: 3868 - protein, 18 aa, Artificial
  Short Peptide
KKKLFKKIPKFLKVAKKF

SEQ ID NO: 3869 - protein, 18 aa, Artificial
  Short Peptide
RKKLFKKIPKFLKVAKKF

SEQ ID NO: 3870 - protein, 18 aa, Artificial
  Short Peptide
FKKLFKKIPKFLKVAKKF

SEQ ID NO: 3871 - protein, 18 aa, Artificial
  Short Peptide
KWKLFKKIPKFLKVAKKF

SEQ ID NO: 3872 - protein, 18 aa, Artificial
  Short Peptide
RWKLFKKIPKFLKVAKKF

SEQ ID NO: 3873 - protein, 18 aa, Artificial
  Short Peptide
FWKLFKKIPKFLKVAKKF

SEQ ID NO: 3874 - protein, 18 aa, Artificial
  Short Peptide
KKKKFKKIPKFLKVAKKF

SEQ ID NO: 3875 - protein, 18 aa, Artificial
  Short Peptide
RKKKFKKIPKFLKVAKKF

SEQ ID NO: 3876 - protein, 18 aa, Artificial
  Short Peptide
FKKKFKKIPKFLKVAKKF

SEQ ID NO: 3877 - protein, 18 aa, Artificial
  Short Peptide
KWKKFKKIPKFLKVAKKF

SEQ ID NO: 3878 - protein, 18 aa, Artificial
  Short Peptide
RWKKFKKIPKFLKVAKKF

SEQ ID NO: 3879 - protein, 18 aa, Artificial
  Short Peptide
FWKKFKKIPKFLKVAKKF

SEQ ID NO: 3880 - protein, 18 aa, Artificial
  Short Peptide
KKKLLKKIPKFLKVAKKF

SEQ ID NO: 3881 - protein, 18 aa, Artificial
  Short Peptide
RKKLLKKIPKFLKVAKKF

SEQ ID NO: 3882 - protein, 18 aa, Artificial
  Short Peptide
FKKLLKKIPKFLKVAKKF

SEQ ID NO: 3883 - protein, 18 aa, Artificial
  Short Peptide
KWKLLKKIPKFLKVAKKF

SEQ ID NO: 3884 - protein, 18 aa, Artificial
  Short Peptide
RWKLLKKIPKFLKVAKKF

SEQ ID NO: 3885 - protein, 18 aa, Artificial
  Short Peptide
FWKLLKKIPKFLKVAKKF

SEQ ID NO: 3886 - protein, 18 aa, Artificial
  Short Peptide
KKKKLKKIPKFLKVAKKF

SEQ ID NO: 3887 - protein, 18 aa, Artificial
  Short Peptide
RKKKLKKIPKFLKVAKKF

SEQ ID NO: 3888 - protein, 18 aa, Artificial
  Short Peptide
FKKKLKKIPKFLKVAKKF

SEQ ID NO: 3889 - protein, 18 aa, Artificial
  Short Peptide
KWKKLKKIPKFLKVAKKF

SEQ ID NO: 3890 - protein, 18 aa, Artificial
  Short Peptide
RWKKLKKIPKFLKVAKKF

SEQ ID NO: 3891 - protein, 18 aa, Artificial
  Short Peptide
FWKKLKKIPKFLKVAKKF

SEQ ID NO: 3892 - protein, 20 aa, Artificial
  Short Peptide
KKKLFLKIPPPKFKKVAKKF

SEQ ID NO: 3893 - protein, 20 aa, Artificial
  Short Peptide
RKKLFLKIPPPKFKKVAKKF

SEQ ID NO: 3894 - protein, 20 aa, Artificial
  Short Peptide
FKKLFLKIPPPKFKKVAKKF

SEQ ID NO: 3895 - protein, 20 aa, Artificial
  Short Peptide
KWKLFLKIPPPKFKKVAKKF

SEQ ID NO: 3896 - protein, 20 aa, Artificial
  Short Peptide
RWKLFLKIPPPKFKKVAKKF

SEQ ID NO: 3897 - protein, 20 aa, Artificial
  Short Peptide
FWKLFLKIPPPKFKKVAKKF

SEQ ID NO: 3898 - protein, 20 aa, Artificial
  Short Peptide
KKKKFLKIPPPKFKKVAKKF

SEQ ID NO: 3899 - protein, 20 aa, Artificial
  Short Peptide
RKKKFLKIPPPKFKKVAKKF

SEQ ID NO: 3900 - protein, 20 aa, Artificial
  Short Peptide
FKKKFLKIPPPKFKKVAKKF

SEQ ID NO: 3901 - protein, 20 aa, Artificial
  Short Peptide
KWKKFLKIPPPKFKKVAKKF

SEQ ID NO: 3902 - protein, 20 aa, Artificial
  Short Peptide
RWKKFLKIPPPKFKKVAKKF

SEQ ID NO: 3903 - protein, 20 aa, Artificial
  Short Peptide
FWKKFLKIPPPKFKKVAKKF

SEQ ID NO: 3904 - protein, 20 aa, Artificial
  Short Peptide
KKKLLLKIPPPKFKKVAKKF

SEQ ID NO: 3905 - protein, 20 aa, Artificial
  Short Peptide
RKKLLLKIPPPKFKKVAKKF

SEQ ID NO: 3906 - protein, 20 aa, Artificial
  Short Peptide
FKKLLLKIPPPKFKKVAKKF

SEQ ID NO: 3907 - protein, 20 aa, Artificial
  Short Peptide
KWKLLLKIPPPKFKKVAKKF

SEQ ID NO: 3908 - protein, 20 aa, Artificial
  Short Peptide
RWKLLLKIPPPKFKKVAKKF

SEQ ID NO: 3909 - protein, 20 aa, Artificial
  Short Peptide
FWKLLLKIPPPKFKKVAKKF

SEQ ID NO: 3910 - protein, 20 aa, Artificial
  Short Peptide
KKKKLLKIPPPKFKKVAKKF

SEQ ID NO: 3911 - protein, 20 aa, Artificial
  Short Peptide
RKKKLLKIPPPKFKKVAKKF

SEQ ID NO: 3912 - protein, 20 aa, Artificial
  Short Peptide
FKKKLLKIPPPKFKKVAKKF

SEQ ID NO: 3913 - protein, 20 aa, Artificial
  Short Peptide
KWKKLLKIPPPKFKKVAKKF

SEQ ID NO: 3914 - protein, 20 aa, Artificial
  Short Peptide
RWKKLLKIPPPKFKKVAKKF

SEQ ID NO: 3915 - protein, 20 aa, Artificial
  Short Peptide
FWKKLLKIPPPKFKKVAKKF

SEQ ID NO: 3916 - protein, 20 aa, Artificial
  Short Peptide
KKKLFKKIPPPKFKKVAKKF

SEQ ID NO: 3917 - protein, 20 aa, Artificial
  Short Peptide
RKKLFKKIPPPKFKKVAKKF

SEQ ID NO: 3918 - protein, 20 aa, Artificial
  Short Peptide
FKKLFKKIPPPKFKKVAKKF

SEQ ID NO: 3919 - protein, 20 aa, Artificial
  Short Peptide
KWKLFKKIPPPKFKKVAKKF

SEQ ID NO: 3920 - protein, 20 aa, Artificial
  Short Peptide
RWKLFKKIPPPKFKKVAKKF

SEQ ID NO: 3921 - protein, 20 aa, Artificial
  Short Peptide
FWKLFKKIPPPKFKKVAKKF

SEQ ID NO: 3922 - protein, 20 aa, Artificial
  Short Peptide
KKKKFKKIPPPKFKKVAKKF

SEQ ID NO: 3923 - protein, 20 aa, Artificial
  Short Peptide
RKKKFKKIPPPKFKKVAKKF

SEQ ID NO: 3924 - protein, 20 aa, Artificial
  Short Peptide
FKKKFKKIPPPKFKKVAKKF

SEQ ID NO: 3925 - protein, 20 aa, Artificial
  Short Peptide
KWKKFKKIPPPKFKKVAKKF

SEQ ID NO: 3926 - protein, 20 aa, Artificial
  Short Peptide
RWKKFKKIPPPKFKKVAKKF

SEQ ID NO: 3927 - protein, 20 aa, Artificial
  Short Peptide
FWKKFKKIPPPKFKKVAKKF

SEQ ID NO: 3928 - protein, 20 aa, Artificial
  Short Peptide
KKKLLKKIPPPKFKKVAKKF

SEQ ID NO: 3929 - protein, 20 aa, Artificial
  Short Peptide
RKKLLKKIPPPKFKKVAKKF

SEQ ID NO: 3930 - protein, 20 aa, Artificial
  Short Peptide
FKKLLKKIPPPKFKKVAKKF

SEQ ID NO: 3931 - protein, 20 aa, Artificial
  Short Peptide
KWKLLKKIPPPKFKKVAKKF

SEQ ID NO: 3932 - protein, 20 aa, Artificial
  Short Peptide
RWKLLKKIPPPKFKKVAKKF

SEQ ID NO: 3933 - protein, 20 aa, Artificial
  Short Peptide
FWKLLKKIPPPKFKKVAKKF

SEQ ID NO: 3934 - protein, 20 aa, Artificial
  Short Peptide
KKKKLKKIPPPKFKKVAKKF

SEQ ID NO: 3935 - protein, 20 aa, Artificial
  Short Peptide
RKKKLKKIPPPKFKKVAKKF

SEQ ID NO: 3936 - protein, 20 aa, Artificial
  Short Peptide
FKKKLKKIPPPKFKKVAKKF

SEQ ID NO: 3937 - protein, 20 aa, Artificial
  Short Peptide
KWKKLKKIPPPKFKKVAKKF

SEQ ID NO: 3938 - protein, 20 aa, Artificial
  Short Peptide
RWKKLKKIPPPKFKKVAKKF

SEQ ID NO: 3939 - protein, 20 aa, Artificial
  Short Peptide
FWKKLKKIPPPKFKKVAKKF

SEQ ID NO: 3940 - protein, 19 aa, Artificial
  Short Peptide
KKKLFLKIPPKFKKVAKKF

SEQ ID NO: 3941 - protein, 19 aa, Artificial
  Short Peptide
RKKLFLKIPPKFKKVAKKF

SEQ ID NO: 3942 - protein, 19 aa, Artificial
  Short Peptide
FKKLFLKIPPKFKKVAKKF

SEQ ID NO: 3943 - protein, 19 aa, Artificial
  Short Peptide
KWKLFLKIPPKFKKVAKKF

SEQ ID NO: 3944 - protein, 19 aa, Artificial
  Short Peptide
RWKLFLKIPPKFKKVAKKF

SEQ ID NO: 3945 - protein, 19 aa, Artificial
  Short Peptide
FWKLFLKIPPKFKKVAKKF

SEQ ID NO: 3946 - protein, 19 aa, Artificial
  Short Peptide
KKKKFLKIPPKFKKVAKKF

SEQ ID NO: 3947 - protein, 19 aa, Artificial
  Short Peptide
RKKKFLKIPPKFKKVAKKF

SEQ ID NO: 3948 - protein, 19 aa, Artificial
  Short Peptide
FKKKFLKIPPKFKKVAKKF

SEQ ID NO: 3949 - protein, 19 aa, Artificial
  Short Peptide
KWKKFLKIPPKFKKVAKKF

SEQ ID NO: 3950 - protein, 19 aa, Artificial
  Short Peptide
RWKKFLKIPPKFKKVAKKF

SEQ ID NO: 3951 - protein, 19 aa, Artificial
  Short Peptide
FWKKFLKIPPKFKKVAKKF

SEQ ID NO: 3952 - protein, 19 aa, Artificial
  Short Peptide
KKKLLLKIPPKFKKVAKKF

SEQ ID NO: 3953 - protein, 19 aa, Artificial
  Short Peptide
RKKLLLKIPPKFKKVAKKF

SEQ ID NO: 3954 - protein, 19 aa, Artificial
  Short Peptide
FKKLLLKIPPKFKKVAKKF

SEQ ID NO: 3955 - protein, 19 aa, Artificial
  Short Peptide
KWKLLLKIPPKFKKVAKKF

SEQ ID NO: 3956 - protein, 19 aa, Artificial
  Short Peptide
RWKLLLKIPPKFKKVAKKF

SEQ ID NO: 3957 - protein, 19 aa, Artificial
  Short Peptide
FWKLLLKIPPKFKKVAKKF

SEQ ID NO: 3958 - protein, 19 aa, Artificial
  Short Peptide
KKKKLLKIPPKFKKVAKKF

SEQ ID NO: 3959 - protein, 19 aa, Artificial
  Short Peptide
RKKKLLKIPPKFKKVAKKF

SEQ ID NO: 3960 - protein, 19 aa, Artificial
  Short Peptide
FKKKLLKIPPKFKKVAKKF

SEQ ID NO: 3961 - protein, 19 aa, Artificial
  Short Peptide
KWKKLLKIPPKFKKVAKKF

SEQ ID NO: 3962 - protein, 19 aa, Artificial
  Short Peptide
RWKKLLKIPPKFKKVAKKF

SEQ ID NO: 3963 - protein, 19 aa, Artificial
  Short Peptide
FWKKLLKIPPKFKKVAKKF

SEQ ID NO: 3964 - protein, 19 aa, Artificial
  Short Peptide
KKKLFKKIPPKFKKVAKKF

SEQ ID NO: 3965 - protein, 19 aa, Artificial
  Short Peptide
RKKLFKKIPPKFKKVAKKF

SEQ ID NO: 3966 - protein, 19 aa, Artificial
  Short Peptide
FKKLFKKIPPKFKKVAKKF

SEQ ID NO: 3967 - protein, 19 aa, Artificial
  Short Peptide
KWKLFKKIPPKFKKVAKKF

SEQ ID NO: 3968 - protein, 19 aa, Artificial
  Short Peptide
RWKLFKKIPPKFKKVAKKF

SEQ ID NO: 3969 - protein, 19 aa, Artificial
  Short Peptide
FWKLFKKIPPKFKKVAKKF

SEQ ID NO: 3970 - protein, 19 aa, Artificial
  Short Peptide
KKKKFKKIPPKFKKVAKKF

SEQ ID NO: 3971 - protein, 19 aa, Artificial
  Short Peptide
RKKKFKKIPPKFKKVAKKF

SEQ ID NO: 3972 - protein, 19 aa, Artificial
  Short Peptide
FKKKFKKIPPKFKKVAKKF

SEQ ID NO: 3973 - protein, 19 aa, Artificial
  Short Peptide
KWKKFKKIPPKFKKVAKKF

SEQ ID NO: 3974 - protein, 19 aa, Artificial
  Short Peptide
RWKKFKKIPPKFKKVAKKF

SEQ ID NO: 3975 - protein, 19 aa, Artificial
  Short Peptide
FWKKFKKIPPKFKKVAKKF

SEQ ID NO: 3976 - protein, 19 aa, Artificial
  Short Peptide
KKKLLKKIPPKFKKVAKKF

SEQ ID NO: 3977 - protein, 19 aa, Artificial
  Short Peptide
RKKLLKKIPPKFKKVAKKF

SEQ ID NO: 3978 - protein, 19 aa, Artificial
  Short Peptide
FKKLLKKIPPKFKKVAKKF

SEQ ID NO: 3979 - protein, 19 aa, Artificial
  Short Peptide
KWKLLKKIPPKFKKVAKKF

SEQ ID NO: 3980 - protein, 19 aa, Artificial
  Short Peptide
RWKLLKKIPPKFKKVAKKF

SEQ ID NO: 3981 - protein, 19 aa, Artificial
  Short Peptide
FWKLLKKIPPKFKKVAKKF

SEQ ID NO: 3982 - protein, 19 aa, Artificial
  Short Peptide
KKKKLKKIPPKFKKVAKKF

SEQ ID NO: 3983 - protein, 19 aa, Artificial
  Short Peptide
RKKKLKKIPPKFKKVAKKF

SEQ ID NO: 3984 - protein, 19 aa, Artificial
  Short Peptide
FKKKLKKIPPKFKKVAKKF

SEQ ID NO: 3985 - protein, 19 aa, Artificial
  Short Peptide
KWKKLKKIPPKFKKVAKKF

SEQ ID NO: 3986 - protein, 19 aa, Artificial
  Short Peptide
RWKKLKKIPPKFKKVAKKF

SEQ ID NO: 3987 - protein, 19 aa, Artificial
  Short Peptide
FWKKLKKIPPKFKKVAKKF

SEQ ID NO: 3988 - protein, 18 aa, Artificial
  Short Peptide
KKKLFLKIPKFKKVAKKF

SEQ ID NO: 3989 - protein, 18 aa, Artificial
  Short Peptide
RKKLFLKIPKFKKVAKKF

SEQ ID NO: 3990 - protein, 18 aa, Artificial
  Short Peptide
FKKLFLKIPKFKKVAKKF

SEQ ID NO: 3991 - protein, 18 aa, Artificial
  Short Peptide
KWKLFLKIPKFKKVAKKF

SEQ ID NO: 3992 - protein, 18 aa, Artificial
  Short Peptide
RWKLFLKIPKFKKVAKKF

SEQ ID NO: 3993 - protein, 18 aa, Artificial
  Short Peptide
FWKLFLKIPKFKKVAKKF

SEQ ID NO: 3994 - protein, 18 aa, Artificial
  Short Peptide
KKKKFLKIPKFKKVAKKF

SEQ ID NO: 3995 - protein, 18 aa, Artificial
  Short Peptide
RKKKFLKIPKFKKVAKKF

SEQ ID NO: 3996 - protein, 18 aa, Artificial
  Short Peptide
FKKKFLKIPKFKKVAKKF

SEQ ID NO: 3997 - protein, 18 aa, Artificial
  Short Peptide
KWKKFLKIPKFKKVAKKF

SEQ ID NO: 3998 - protein, 18 aa, Artificial
  Short Peptide
RWKKFLKIPKFKKVAKKF

SEQ ID NO: 3999 - protein, 18 aa, Artificial
  Short Peptide
FWKKFLKIPKFKKVAKKF

SEQ ID NO: 4000 - protein, 18 aa, Artificial
  Short Peptide
KKKLLLKIPKFKKVAKKF

SEQ ID NO: 4001 - protein, 18 aa, Artificial
  Short Peptide
RKKLLLKIPKFKKVAKKF

SEQ ID NO: 4002 - protein, 18 aa, Artificial
  Short Peptide
FKKLLLKIPKFKKVAKKF

SEQ ID NO: 4003 - protein, 18 aa, Artificial
  Short Peptide
KWKLLLKIPKFKKVAKKF

SEQ ID NO: 4004 - protein, 18 aa, Artificial
  Short Peptide
RWKLLLKIPKFKKVAKKF

SEQ ID NO: 4005 - protein, 18 aa, Artificial
  Short Peptide
FWKLLLKIPKFKKVAKKF

SEQ ID NO: 4006 - protein, 18 aa, Artificial
  Short Peptide
KKKKLLKIPKFKKVAKKF

SEQ ID NO: 4007 - protein, 18 aa, Artificial
  Short Peptide
RKKKLLKIPKFKKVAKKF

SEQ ID NO: 4008 - protein, 18 aa, Artificial
  Short Peptide
FKKKLLKIPKFKKVAKKF

SEQ ID NO: 4009 - protein, 18 aa, Artificial
  Short Peptide
KWKKLLKIPKFKKVAKKF

SEQ ID NO: 4010 - protein, 18 aa, Artificial
  Short Peptide
RWKKLLKIPKFKKVAKKF

SEQ ID NO: 4011 - protein, 18 aa, Artificial
  Short Peptide
FWKKLLKIPKFKKVAKKF

SEQ ID NO: 4012 - protein, 18 aa, Artificial
  Short Peptide
KKKLFKKIPKFKKVAKKF

SEQ ID NO: 4013 - protein, 18 aa, Artificial
  Short Peptide
RKKLFKKIPKFKKVAKKF

SEQ ID NO: 4014 - protein, 18 aa, Artificial
  Short Peptide
FKKLFKKIPKFKKVAKKF

SEQ ID NO: 4015 - protein, 18 aa, Artificial
  Short Peptide
KWKLFKKIPKFKKVAKKF

SEQ ID NO: 4016 - protein, 18 aa, Artificial
  Short Peptide
RWKLFKKIPKFKKVAKKF

SEQ ID NO: 4017 - protein, 18 aa, Artificial
  Short Peptide
FWKLFKKIPKFKKVAKKF

SEQ ID NO: 4018 - protein, 18 aa, Artificial
  Short Peptide
KKKKFKKIPKFKKVAKKF

SEQ ID NO: 4019 - protein, 18 aa, Artificial
  Short Peptide
RKKKFKKIPKFKKVAKKF

SEQ ID NO: 4020 - protein, 18 aa, Artificial
  Short Peptide
FKKKFKKIPKFKKVAKKF

SEQ ID NO: 4021 - protein, 18 aa, Artificial
  Short Peptide
KWKKFKKIPKFKKVAKKF

SEQ ID NO: 4022 - protein, 18 aa, Artificial
  Short Peptide
RWKKFKKIPKFKKVAKKF

SEQ ID NO: 4023 - protein, 18 aa, Artificial
  Short Peptide
FWKKFKKIPKFKKVAKKF

SEQ ID NO: 4024 - protein, 18 aa, Artificial
  Short Peptide
KKKLLKKIPKFKKVAKKF

SEQ ID NO: 4025 - protein, 18 aa, Artificial
  Short Peptide
RKKLLKKIPKFKKVAKKF

SEQ ID NO: 4026 - protein, 18 aa, Artificial
  Short Peptide
FKKLLKKIPKFKKVAKKF

SEQ ID NO: 4027 - protein, 18 aa, Artificial
  Short Peptide
KWKLLKKIPKFKKVAKKF

SEQ ID NO: 4028 - protein, 18 aa, Artificial
  Short Peptide
RWKLLKKIPKFKKVAKKF

SEQ ID NO: 4029 - protein, 18 aa, Artificial
  Short Peptide
FWKLLKKIPKFKKVAKKF

SEQ ID NO: 4030 - protein, 18 aa, Artificial
  Short Peptide
KKKKLKKIPKFKKVAKKF

SEQ ID NO: 4031 - protein, 18 aa, Artificial
  Short Peptide
RKKKLKKIPKFKKVAKKF

SEQ ID NO: 4032 - protein, 18 aa, Artificial
  Short Peptide
FKKKLKKIPKFKKVAKKF

SEQ ID NO: 4033 - protein, 18 aa, Artificial
  Short Peptide
KWKKLKKIPKFKKVAKKF

SEQ ID NO: 4034 - protein, 18 aa, Artificial
  Short Peptide
RWKKLKKIPKFKKVAKKF

SEQ ID NO: 4035 - protein, 18 aa, Artificial
  Short Peptide
FWKKLKKIPKFKKVAKKF

SEQ ID NO: 4036 - protein, 20 aa, Artificial
  Short Peptide
KKKLFLKIPPPKFLHSAKKF

SEQ ID NO: 4037 - protein, 20 aa, Artificial
  Short Peptide
RKKLFLKIPPPKFLHSAKKF

SEQ ID NO: 4038 - protein, 20 aa, Artificial
  Short Peptide
FKKLFLKIPPPKFLHSAKKF

SEQ ID NO: 4039 - protein, 20 aa, Artificial
  Short Peptide
KWKLFLKIPPPKFLHSAKKF

SEQ ID NO: 4040 - protein, 20 aa, Artificial
  Short Peptide
RWKLFLKIPPPKFLHSAKKF

SEQ ID NO: 4041 - protein, 20 aa, Artificial
  Short Peptide
FWKLFLKIPPPKFLHSAKKF

SEQ ID NO: 4042 - protein, 20 aa, Artificial
  Short Peptide
KKKKFLKIPPPKFLHSAKKF

SEQ ID NO: 4043 - protein, 20 aa, Artificial
  Short Peptide
RKKKFLKIPPPKFLHSAKKF

SEQ ID NO: 4044 - protein, 20 aa, Artificial
  Short Peptide
FKKKFLKIPPPKFLHSAKKF

SEQ ID NO: 4045 - protein, 20 aa, Artificial
  Short Peptide
KWKKFLKIPPPKFLHSAKKF

SEQ ID NO: 4046 - protein, 20 aa, Artificial
  Short Peptide
RWKKFLKIPPPKFLHSAKKF

SEQ ID NO: 4047 - protein, 20 aa, Artificial
  Short Peptide
FWKKFLKIPPPKFLHSAKKF

SEQ ID NO: 4048 - protein, 20 aa, Artificial
  Short Peptide
KKKLLLKIPPPKFLHSAKKF

SEQ ID NO: 4049 - protein, 20 aa, Artificial
  Short Peptide
RKKLLLKIPPPKFLHSAKKF

SEQ ID NO: 4050 - protein, 20 aa, Artificial
  Short Peptide
FKKLLLKIPPPKFLHSAKKF

SEQ ID NO: 4051 - protein, 20 aa, Artificial
  Short Peptide
KWKLLLKIPPPKFLHSAKKF

SEQ ID NO: 4052 - protein, 20 aa, Artificial
  Short Peptide
RWKLLLKIPPPKFLHSAKKF

SEQ ID NO: 4053 - protein, 20 aa, Artificial
  Short Peptide
FWKLLLKIPPPKFLHSAKKF

SEQ ID NO: 4054 - protein, 20 aa, Artificial
  Short Peptide
KKKKLLKIPPPKFLHSAKKF

SEQ ID NO: 4055 - protein, 20 aa, Artificial
  Short Peptide
RKKKLLKIPPPKFLHSAKKF

SEQ ID NO: 4056 - protein, 20 aa, Artificial
  Short Peptide
FKKKLLKIPPPKFLHSAKKF

SEQ ID NO: 4057 - protein, 20 aa, Artificial
  Short Peptide
KWKKLLKIPPPKFLHSAKKF

SEQ ID NO: 4058 - protein, 20 aa, Artificial
  Short Peptide
RWKKLLKIPPPKFLHSAKKF

SEQ ID NO: 4059 - protein, 20 aa, Artificial
  Short Peptide
FWKKLLKIPPPKFLHSAKKF

SEQ ID NO: 4060 - protein, 20 aa, Artificial
  Short Peptide
KKKLFKKIPPPKFLHSAKKF

SEQ ID NO: 4061 - protein, 20 aa, Artificial
  Short Peptide
RKKLFKKIPPPKFLHSAKKF

SEQ ID NO: 4062 - protein, 20 aa, Artificial
  Short Peptide
FKKLFKKIPPPKFLHSAKKF

SEQ ID NO: 4063 - protein, 20 aa, Artificial
  Short Peptide
KWKLFKKIPPPKFLHSAKKF

SEQ ID NO: 4064 - protein, 20 aa, Artificial
  Short Peptide
RWKLFKKIPPPKFLHSAKKF

SEQ ID NO: 4065 - protein, 20 aa, Artificial
  Short Peptide
FWKLFKKIPPPKFLHSAKKF

SEQ ID NO: 4066 - protein, 20 aa, Artificial
  Short Peptide
KKKKFKKIPPPKFLHSAKKF

SEQ ID NO: 4067 - protein, 20 aa, Artificial
  Short Peptide
RKKKFKKIPPPKFLHSAKKF

SEQ ID NO: 4068 - protein, 20 aa, Artificial
  Short Peptide
FKKKFKKIPPPKFLHSAKKF

SEQ ID NO: 4069 - protein, 20 aa, Artificial
  Short Peptide
KWKKFKKIPPPKFLHSAKKF

SEQ ID NO: 4070 - protein, 20 aa, Artificial
  Short Peptide
RWKKFKKIPPPKFLHSAKKF

SEQ ID NO: 4071 - protein, 20 aa, Artificial
  Short Peptide
FWKKFKKIPPPKFLHSAKKF

SEQ ID NO: 4072 - protein, 20 aa, Artificial
  Short Peptide
KKKLLKKIPPPKFLHSAKKF

SEQ ID NO: 4073 - protein, 20 aa, Artificial
  Short Peptide
RKKLLKKIPPPKFLHSAKKF

SEQ ID NO: 4074 - protein, 20 aa, Artificial
  Short Peptide
FKKLLKKIPPPKFLHSAKKF

SEQ ID NO: 4075 - protein, 20 aa, Artificial
  Short Peptide
KWKLLKKIPPPKFLHSAKKF

SEQ ID NO: 4076 - protein, 20 aa, Artificial
  Short Peptide
RWKLLKKIPPPKFLHSAKKF

SEQ ID NO: 4077 - protein, 20 aa, Artificial
  Short Peptide
FWKLLKKIPPPKFLHSAKKF

SEQ ID NO: 4078 - protein, 20 aa, Artificial
  Short Peptide
KKKKLKKIPPPKFLHSAKKF

SEQ ID NO: 4079 - protein, 20 aa, Artificial
  Short Peptide
RKKKLKKIPPPKFLHSAKKF

SEQ ID NO: 4080 - protein, 20 aa, Artificial
  Short Peptide
FKKKLKKIPPPKFLHSAKKF

SEQ ID NO: 4081 - protein, 20 aa, Artificial
  Short Peptide
KWKKLKKIPPPKFLHSAKKF

SEQ ID NO: 4082 - protein, 20 aa, Artificial
  Short Peptide
RWKKLKKIPPPKFLHSAKKF

SEQ ID NO: 4083 - protein, 20 aa, Artificial
  Short Peptide
FWKKLKKIPPPKFLHSAKKF

SEQ ID NO: 4084 - protein, 19 aa, Artificial
  Short Peptide
KKKLFLKIPPKFLHSAKKF

SEQ ID NO: 4085 - protein, 19 aa, Artificial
  Short Peptide
RKKLFLKIPPKFLHSAKKF

SEQ ID NO: 4086 - protein, 19 aa, Artificial
  Short Peptide
FKKLFLKIPPKFLHSAKKF

SEQ ID NO: 4087 - protein, 19 aa, Artificial
  Short Peptide
KWKLFLKIPPKFLHSAKKF

SEQ ID NO: 4088 - protein, 19 aa, Artificial
  Short Peptide
RWKLFLKIPPKFLHSAKKF

SEQ ID NO: 4089 - protein, 19 aa, Artificial
  Short Peptide
FWKLFLKIPPKFLHSAKKF

SEQ ID NO: 4090 - protein, 19 aa, Artificial
  Short Peptide
KKKKFLKIPPKFLHSAKKF

SEQ ID NO: 4091 - protein, 19 aa, Artificial
  Short Peptide
RKKKFLKIPPKFLHSAKKF

SEQ ID NO: 4092 - protein, 19 aa, Artificial
  Short Peptide
FKKKFLKIPPKFLHSAKKF

SEQ ID NO: 4093 - protein, 19 aa, Artificial
  Short Peptide
KWKKFLKIPPKFLHSAKKF

SEQ ID NO: 4094 - protein, 19 aa, Artificial
  Short Peptide
RWKKFLKIPPKFLHSAKKF

SEQ ID NO: 4095 - protein, 19 aa, Artificial
  Short Peptide
FWKKFLKIPPKFLHSAKKF

SEQ ID NO: 4096 - protein, 19 aa, Artificial
  Short Peptide
KKKLLLKIPPKFLHSAKKF

SEQ ID NO: 4097 - protein, 19 aa, Artificial
  Short Peptide
RKKLLLKIPPKFLHSAKKF

SEQ ID NO: 4098 - protein, 19 aa, Artificial
  Short Peptide
FKKLLLKIPPKFLHSAKKF

SEQ ID NO: 4099 - protein, 19 aa, Artificial
  Short Peptide
KWKLLLKIPPKFLHSAKKF

SEQ ID NO: 4100 - protein, 19 aa, Artificial
  Short Peptide
RWKLLLKIPPKFLHSAKKF

SEQ ID NO: 4101 - protein, 19 aa, Artificial
  Short Peptide
FWKLLLKIPPKFLHSAKKF

SEQ ID NO: 4102 - protein, 19 aa, Artificial
  Short Peptide
KKKKLLKIPPKFLHSAKKF

SEQ ID NO: 4103 - protein, 19 aa, Artificial
  Short Peptide
RKKKLLKIPPKFLHSAKKF

SEQ ID NO: 4104 - protein, 19 aa, Artificial
  Short Peptide
FKKKLLKIPPKFLHSAKKF

SEQ ID NO: 4105 - protein, 19 aa, Artificial
  Short Peptide
KWKKLLKIPPKFLHSAKKF

SEQ ID NO: 4106 - protein, 19 aa, Artificial
  Short Peptide
RWKKLLKIPPKFLHSAKKF

SEQ ID NO: 4107 - protein, 19 aa, Artificial
  Short Peptide
FWKKLLKIPPKFLHSAKKF

SEQ ID NO: 4108 - protein, 19 aa, Artificial
  Short Peptide
KKKLFKKIPPKFLHSAKKF

SEQ ID NO: 4109 - protein, 19 aa, Artificial
  Short Peptide
RKKLFKKIPPKFLHSAKKF

SEQ ID NO: 4110 - protein, 19 aa, Artificial
  Short Peptide
FKKLFKKIPPKFLHSAKKF

SEQ ID NO: 4111 - protein, 19 aa, Artificial
  Short Peptide
KWKLFKKIPPKFLHSAKKF

SEQ ID NO: 4112 - protein, 19 aa, Artificial
  Short Peptide
RWKLFKKIPPKFLHSAKKF

SEQ ID NO: 4113 - protein, 19 aa, Artificial
  Short Peptide
FWKLFKKIPPKFLHSAKKF

SEQ ID NO: 4114 - protein, 19 aa, Artificial
  Short Peptide
KKKKFKKIPPKFLHSAKKF

SEQ ID NO: 4115 - protein, 19 aa, Artificial
  Short Peptide
RKKKFKKIPPKFLHSAKKF

SEQ ID NO: 4116 - protein, 19 aa, Artificial
  Short Peptide
FKKKFKKIPPKFLHSAKKF

SEQ ID NO: 4117 - protein, 19 aa, Artificial
  Short Peptide
KWKKFKKIPPKFLHSAKKF

SEQ ID NO: 4118 - protein, 19 aa, Artificial
  Short Peptide
RWKKFKKIPPKFLHSAKKF

SEQ ID NO: 4119 - protein, 19 aa, Artificial
  Short Peptide
FWKKFKKIPPKFLHSAKKF

SEQ ID NO: 4120 - protein, 19 aa, Artificial
  Short Peptide
KKKLLKKIPPKFLHSAKKF

SEQ ID NO: 4121 - protein, 19 aa, Artificial
  Short Peptide
RKKLLKKIPPKFLHSAKKF

SEQ ID NO: 4122 - protein, 19 aa, Artificial
  Short Peptide
FKKLLKKIPPKFLHSAKKF

SEQ ID NO: 4123 - protein, 19 aa, Artificial
  Short Peptide
KWKLLKKIPPKFLHSAKKF

SEQ ID NO: 4124 - protein, 19 aa, Artificial
  Short Peptide
RWKLLKKIPPKFLHSAKKF

SEQ ID NO: 4125 - protein, 19 aa, Artificial
  Short Peptide
FWKLLKKIPPKFLHSAKKF

SEQ ID NO: 4126 - protein, 19 aa, Artificial
  Short Peptide
KKKKLKKIPPKFLHSAKKF

SEQ ID NO: 4127 - protein, 19 aa, Artificial
  Short Peptide
RKKKLKKIPPKFLHSAKKF

SEQ ID NO: 4128 - protein, 19 aa, Artificial
  Short Peptide
FKKKLKKIPPKFLHSAKKF

SEQ ID NO: 4129 - protein, 19 aa, Artificial
  Short Peptide
KWKKLKKIPPKFLHSAKKF

SEQ ID NO: 4130 - protein, 19 aa, Artificial
  Short Peptide
RWKKLKKIPPKFLHSAKKF

SEQ ID NO: 4131 - protein, 19 aa, Artificial
  Short Peptide
FWKKLKKIPPKFLHSAKKF

SEQ ID NO: 4132 - protein, 18 aa, Artificial
  Short Peptide
KKKLFLKIPKFLHSAKKF

SEQ ID NO: 4133 - protein, 18 aa, Artificial
  Short Peptide
RKKLFLKIPKFLHSAKKF

SEQ ID NO: 4134 - protein, 18 aa, Artificial
  Short Peptide
FKKLFLKIPKFLHSAKKF

SEQ ID NO: 4135 - protein, 18 aa, Artificial
  Short Peptide
KWKLFLKIPKFLHSAKKF

SEQ ID NO: 4136 - protein, 18 aa, Artificial
  Short Peptide
RWKLFLKIPKFLHSAKKF

SEQ ID NO: 4137 - protein, 18 aa, Artificial
  Short Peptide
FWKLFLKIPKFLHSAKKF

SEQ ID NO: 4138 - protein, 18 aa, Artificial
  Short Peptide
KKKKFLKIPKFLHSAKKF

SEQ ID NO: 4139 - protein, 18 aa, Artificial
  Short Peptide
RKKKFLKIPKFLHSAKKF

SEQ ID NO: 4140 - protein, 18 aa, Artificial
  Short Peptide
FKKKFLKIPKFLHSAKKF

SEQ ID NO: 4141 - protein, 18 aa, Artificial
  Short Peptide
KWKKFLKIPKFLHSAKKF

SEQ ID NO: 4142 - protein, 18 aa, Artificial
  Short Peptide
RWKKFLKIPKFLHSAKKF

SEQ ID NO: 4143 - protein, 18 aa, Artificial
  Short Peptide
FWKKFLKIPKFLHSAKKF

SEQ ID NO: 4144 - protein, 18 aa, Artificial
  Short Peptide
KKKLLLKIPKFLHSAKKF

SEQ ID NO: 4145 - protein, 18 aa, Artificial
  Short Peptide
RKKLLLKIPKFLHSAKKF

SEQ ID NO: 4146 - protein, 18 aa, Artificial
  Short Peptide
FKKLLLKIPKFLHSAKKF

SEQ ID NO: 4147 - protein, 18 aa, Artificial
  Short Peptide
KWKLLLKIPKFLHSAKKF

SEQ ID NO: 4148 - protein, 18 aa, Artificial
  Short Peptide
RWKLLLKIPKFLHSAKKF

SEQ ID NO: 4149 - protein, 18 aa, Artificial
  Short Peptide
FWKLLLKIPKFLHSAKKF

SEQ ID NO: 4150 - protein, 18 aa, Artificial
  Short Peptide
KKKKLLKIPKFLHSAKKF

SEQ ID NO: 4151 - protein, 18 aa, Artificial
  Short Peptide
RKKKLLKIPKFLHSAKKF

SEQ ID NO: 4152 - protein, 18 aa, Artificial
  Short Peptide
FKKKLLKIPKFLHSAKKF

SEQ ID NO: 4153 - protein, 18 aa, Artificial
  Short Peptide
KWKKLLKIPKFLHSAKKF

SEQ ID NO: 4154 - protein, 18 aa, Artificial
  Short Peptide
RWKKLLKIPKFLHSAKKF

SEQ ID NO: 4155 - protein, 18 aa, Artificial
  Short Peptide
FWKKLLKIPKFLHSAKKF

SEQ ID NO: 4156 - protein, 18 aa, Artificial
  Short Peptide
KKKLFKKIPKFLHSAKKF

SEQ ID NO: 4157 - protein, 18 aa, Artificial
  Short Peptide
RKKLFKKIPKFLHSAKKF

SEQ ID NO: 4158 - protein, 18 aa, Artificial
  Short Peptide
FKKLFKKIPKFLHSAKKF

SEQ ID NO: 4159 - protein, 17 aa, Artificial
  Short Peptide
KWKLFKKIPKFLHSAKK

SEQ ID NO: 4160 - protein, 18 aa, Artificial
  Short Peptide
RWKLFKKIPKFLHSAKKF

SEQ ID NO: 4161 - protein, 18 aa, Artificial
  Short Peptide
FWKLFKKIPKFLHSAKKF

SEQ ID NO: 4162 - protein, 18 aa, Artificial
  Short Peptide
KKKKFKKIPKFLHSAKKF

SEQ ID NO: 4163 - protein, 18 aa, Artificial
  Short Peptide
RKKKFKKIPKFLHSAKKF

SEQ ID NO: 4164 - protein, 18 aa, Artificial
  Short Peptide
FKKKFKKIPKFLHSAKKF

SEQ ID NO: 4165 - protein, 18 aa, Artificial
  Short Peptide
KWKKFKKIPKFLHSAKKF

SEQ ID NO: 4166 - protein, 18 aa, Artificial
  Short Peptide
RWKKFKKIPKFLHSAKKF

SEQ ID NO: 4167 - protein, 18 aa, Artificial
  Short Peptide
FWKKFKKIPKFLHSAKKF

SEQ ID NO: 4168 - protein, 18 aa, Artificial
  Short Peptide
KKKLLKKIPKFLHSAKKF

SEQ ID NO: 4169 - protein, 18 aa, Artificial
  Short Peptide
RKKLLKKIPKFLHSAKKF

SEQ ID NO: 4170 - protein, 18 aa, Artificial
  Short Peptide
FKKLLKKIPKFLHSAKKF

SEQ ID NO: 4171 - protein, 18 aa, Artificial
  Short Peptide
KWKLLKKIPKFLHSAKKF

SEQ ID NO: 4172 - protein, 18 aa, Artificial
  Short Peptide
RWKLLKKIPKFLHSAKKF

SEQ ID NO: 4173 - protein, 18 aa, Artificial
  Short Peptide
FWKLLKKIPKFLHSAKKF

SEQ ID NO: 4174 - protein, 18 aa, Artificial
  Short Peptide
KKKKLKKIPKFLHSAKKF

SEQ ID NO: 4175 - protein, 18 aa, Artificial
  Short Peptide
RKKKLKKIPKFLHSAKKF

SEQ ID NO: 4176 - protein, 18 aa, Artificial
  Short Peptide
FKKKLKKIPKFLHSAKKF

SEQ ID NO: 4177 - protein, 18 aa, Artificial
  Short Peptide
KWKKLKKIPKFLHSAKKF

SEQ ID NO: 4178 - protein, 18 aa, Artificial
  Short Peptide
RWKKLKKIPKFLHSAKKF

SEQ ID NO: 4179 - protein, 18 aa, Artificial
  Short Peptide
FWKKLKKIPKFLHSAKKF

SEQ ID NO: 4180 - protein, 20 aa, Artificial
  Short Peptide
KKKLFLKIPPPKFKHSAKKF

SEQ ID NO: 4181 - protein, 20 aa, Artificial
  Short Peptide
RKKLFLKIPPPKFKHSAKKF

SEQ ID NO: 4182 - protein, 20 aa, Artificial
  Short Peptide
FKKLFLKIPPPKFKHSAKKF

SEQ ID NO: 4183 - protein, 20 aa, Artificial
  Short Peptide
KWKLFLKIPPPKFKHSAKKF

SEQ ID NO: 4184 - protein, 20 aa, Artificial
  Short Peptide
RWKLFLKIPPPKFKHSAKKF

SEQ ID NO: 4185 - protein, 20 aa, Artificial
  Short Peptide
FWKLFLKIPPPKFKHSAKKF

SEQ ID NO: 4186 - protein, 20 aa, Artificial
  Short Peptide
KKKKFLKIPPPKFKHSAKKF

SEQ ID NO: 4187 - protein, 20 aa, Artificial
  Short Peptide
RKKKFLKIPPPKFKHSAKKF

SEQ ID NO: 4188 - protein, 20 aa, Artificial
  Short Peptide
FKKKFLKIPPPKFKHSAKKF

SEQ ID NO: 4189 - protein, 20 aa, Artificial
  Short Peptide
KWKKFLKIPPPKFKHSAKKF

SEQ ID NO: 4190 - protein, 20 aa, Artificial
  Short Peptide
RWKKFLKIPPPKFKHSAKKF

SEQ ID NO: 4191 - protein, 20 aa, Artificial
  Short Peptide
FWKKFLKIPPPKFKHSAKKF

SEQ ID NO: 4192 - protein, 20 aa, Artificial
  Short Peptide
KKKLLLKIPPPKFKHSAKKF

SEQ ID NO: 4193 - protein, 20 aa, Artificial
  Short Peptide
RKKLLLKIPPPKFKHSAKKF

SEQ ID NO: 4194 - protein, 20 aa, Artificial
  Short Peptide
FKKLLLKIPPPKFKHSAKKF

SEQ ID NO: 4195 - protein, 20 aa, Artificial
  Short Peptide
KWKLLLKIPPPKFKHSAKKF

SEQ ID NO: 4196 - protein, 20 aa, Artificial
  Short Peptide
RWKLLLKIPPPKFKHSAKKF

SEQ ID NO: 4197 - protein, 20 aa, Artificial
  Short Peptide
FWKLLLKIPPPKFKHSAKKF

SEQ ID NO: 4198 - protein, 20 aa, Artificial
  Short Peptide
KKKKLLKIPPPKFKHSAKKF

SEQ ID NO: 4199 - protein, 20 aa, Artificial
  Short Peptide
RKKKLLKIPPPKFKHSAKKF

SEQ ID NO: 4200 - protein, 20 aa, Artificial
  Short Peptide
FKKKLLKIPPPKFKHSAKKF

SEQ ID NO: 4201 - protein, 20 aa, Artificial
  Short Peptide
KWKKLLKIPPPKFKHSAKKF

SEQ ID NO: 4202 - protein, 20 aa, Artificial
  Short Peptide
RWKKLLKIPPPKFKHSAKKF

SEQ ID NO: 4203 - protein, 20 aa, Artificial
  Short Peptide
FWKKLLKIPPPKFKHSAKKF

SEQ ID NO: 4204 - protein, 20 aa, Artificial
  Short Peptide
KKKLFKKIPPPKFKHSAKKF

SEQ ID NO: 4205 - protein, 20 aa, Artificial
  Short Peptide
RKKLFKKIPPPKFKHSAKKF

SEQ ID NO: 4206 - protein, 20 aa, Artificial
  Short Peptide
FKKLFKKIPPPKFKHSAKKF

SEQ ID NO: 4207 - protein, 20 aa, Artificial
  Short Peptide
KWKLFKKIPPPKFKHSAKKF

SEQ ID NO: 4208 - protein, 20 aa, Artificial
  Short Peptide
RWKLFKKIPPPKFKHSAKKF

SEQ ID NO: 4209 - protein, 20 aa, Artificial
  Short Peptide
FWKLFKKIPPPKFKHSAKKF

SEQ ID NO: 4210 - protein, 20 aa, Artificial
  Short Peptide
KKKKFKKIPPPKFKHSAKKF

SEQ ID NO: 4211 - protein, 20 aa, Artificial
  Short Peptide
RKKKFKKIPPPKFKHSAKKF

SEQ ID NO: 4212 - protein, 20 aa, Artificial
  Short Peptide
FKKKFKKIPPPKFKHSAKKF

SEQ ID NO: 4213 - protein, 20 aa, Artificial
  Short Peptide
KWKKFKKIPPPKFKHSAKKF

SEQ ID NO: 4214 - protein, 20 aa, Artificial
  Short Peptide
RWKKFKKIPPPKFKHSAKKF

SEQ ID NO: 4215 - protein, 20 aa, Artificial
  Short Peptide
FWKKFKKIPPPKFKHSAKKF

SEQ ID NO: 4216 - protein, 20 aa, Artificial
  Short Peptide
KKKLLKKIPPPKFKHSAKKF

SEQ ID NO: 4217 - protein, 20 aa, Artificial
  Short Peptide
RKKLLKKIPPPKFKHSAKKF

SEQ ID NO: 4218 - protein, 20 aa, Artificial
  Short Peptide
FKKLLKKIPPPKFKHSAKKF

SEQ ID NO: 4219 - protein, 20 aa, Artificial
  Short Peptide
KWKLLKKIPPPKFKHSAKKF

SEQ ID NO: 4220 - protein, 20 aa, Artificial
  Short Peptide
RWKLLKKIPPPKFKHSAKKF

SEQ ID NO: 4221 - protein, 20 aa, Artificial
  Short Peptide
FWKLLKKIPPPKFKHSAKKF

SEQ ID NO: 4222 - protein, 20 aa, Artificial
  Short Peptide
KKKKLKKIPPPKFKHSAKKF

SEQ ID NO: 4223 - protein, 20 aa, Artificial
  Short Peptide
RKKKLKKIPPPKFKHSAKKF

SEQ ID NO: 4224 - protein, 20 aa, Artificial
  Short Peptide
FKKKLKKIPPPKFKHSAKKF

SEQ ID NO: 4225 - protein, 20 aa, Artificial
  Short Peptide
KWKKLKKIPPPKFKHSAKKF

SEQ ID NO: 4226 - protein, 20 aa, Artificial
  Short Peptide
RWKKLKKIPPPKFKHSAKKF

SEQ ID NO: 4227 - protein, 20 aa, Artificial
  Short Peptide
FWKKLKKIPPPKFKHSAKKF

SEQ ID NO: 4228 - protein, 19 aa, Artificial
  Short Peptide
KKKLFLKIPPKFKHSAKKF

SEQ ID NO: 4229 - protein, 19 aa, Artificial
  Short Peptide
RKKLFLKIPPKFKHSAKKF

SEQ ID NO: 4230 - protein, 19 aa, Artificial
  Short Peptide
FKKLFLKIPPKFKHSAKKF

SEQ ID NO: 4231 - protein, 19 aa, Artificial
  Short Peptide
KWKLFLKIPPKFKHSAKKF

SEQ ID NO: 4232 - protein, 19 aa, Artificial
  Short Peptide
RWKLFLKIPPKFKHSAKKF

SEQ ID NO: 4233 - protein, 19 aa, Artificial
  Short Peptide
FWKLFLKIPPKFKHSAKKF

SEQ ID NO: 4234 - protein, 19 aa, Artificial
  Short Peptide
KKKKFLKIPPKFKHSAKKF

SEQ ID NO: 4235 - protein, 19 aa, Artificial
  Short Peptide
RKKKFLKIPPKFKHSAKKF

SEQ ID NO: 4236 - protein, 19 aa, Artificial
  Short Peptide
FKKKFLKIPPKFKHSAKKF

SEQ ID NO: 4237 - protein, 19 aa, Artificial
  Short Peptide
KWKKFLKIPPKFKHSAKKF

SEQ ID NO: 4238 - protein, 19 aa, Artificial
  Short Peptide
RWKKFLKIPPKFKHSAKKF

SEQ ID NO: 4239 - protein, 19 aa, Artificial
  Short Peptide
FWKKFLKIPPKFKHSAKKF

SEQ ID NO: 4240 - protein, 19 aa, Artificial
  Short Peptide
KKKLLLKIPPKFKHSAKKF

SEQ ID NO: 4241 - protein, 19 aa, Artificial
  Short Peptide
RKKLLLKIPPKFKHSAKKF

SEQ ID NO: 4242 - protein, 19 aa, Artificial
  Short Peptide
FKKLLLKIPPKFKHSAKKF

SEQ ID NO: 4243 - protein, 19 aa, Artificial
  Short Peptide
KWKLLLKIPPKFKHSAKKF

SEQ ID NO: 4244 - protein, 19 aa, Artificial
  Short Peptide
RWKLLLKIPPKFKHSAKKF

SEQ ID NO: 4245 - protein, 19 aa, Artificial
  Short Peptide
FWKLLLKIPPKFKHSAKKF

SEQ ID NO: 4246 - protein, 19 aa, Artificial
  Short Peptide
KKKKLLKIPPKFKHSAKKF

SEQ ID NO: 4247 - protein, 19 aa, Artificial
  Short Peptide
RKKKLLKIPPKFKHSAKKF

SEQ ID NO: 4248 - protein, 19 aa, Artificial
  Short Peptide
FKKKLLKIPPKFKHSAKKF

SEQ ID NO: 4249 - protein, 19 aa, Artificial
  Short Peptide
KWKKLLKIPPKFKHSAKKF

SEQ ID NO: 4250 - protein, 19 aa, Artificial
  Short Peptide
RWKKLLKIPPKFKHSAKKF

SEQ ID NO: 4251 - protein, 19 aa, Artificial
  Short Peptide
FWKKLLKIPPKFKHSAKKF

SEQ ID NO: 4252 - protein, 19 aa, Artificial
  Short Peptide
KKKLFKKIPPKFKHSAKKF

SEQ ID NO: 4253 - protein, 19 aa, Artificial
  Short Peptide
RKKLFKKIPPKFKHSAKKF

SEQ ID NO: 4254 - protein, 19 aa, Artificial
  Short Peptide
FKKLFKKIPPKFKHSAKKF

SEQ ID NO: 4255 - protein, 19 aa, Artificial
  Short Peptide
KWKLFKKIPPKFKHSAKKF

SEQ ID NO: 4256 - protein, 19 aa, Artificial
  Short Peptide
RWKLFKKIPPKFKHSAKKF

SEQ ID NO: 4257 - protein, 19 aa, Artificial
  Short Peptide
FWKLFKKIPPKFKHSAKKF

SEQ ID NO: 4258 - protein, 19 aa, Artificial
  Short Peptide
KKKKFKKIPPKFKHSAKKF

SEQ ID NO: 4259 - protein, 19 aa, Artificial
  Short Peptide
RKKKFKKIPPKFKHSAKKF

SEQ ID NO: 4260 - protein, 19 aa, Artificial
  Short Peptide
FKKKFKKIPPKFKHSAKKF

SEQ ID NO: 4261 - protein, 19 aa, Artificial
  Short Peptide
KWKKFKKIPPKFKHSAKKF

SEQ ID NO: 4262 - protein, 19 aa, Artificial
  Short Peptide
RWKKFKKIPPKFKHSAKKF

SEQ ID NO: 4263 - protein, 19 aa, Artificial
  Short Peptide
FWKKFKKIPPKFKHSAKKF

SEQ ID NO: 4264 - protein, 19 aa, Artificial
  Short Peptide
KKKLLKKIPPKFKHSAKKF

SEQ ID NO: 4265 - protein, 19 aa, Artificial
  Short Peptide
RKKLLKKIPPKFKHSAKKF

SEQ ID NO: 4266 - protein, 19 aa, Artificial
  Short Peptide
FKKLLKKIPPKFKHSAKKF

SEQ ID NO: 4267 - protein, 19 aa, Artificial
  Short Peptide
KWKLLKKIPPKFKHSAKKF

SEQ ID NO: 4268 - protein, 19 aa, Artificial
  Short Peptide
RWKLLKKIPPKFKHSAKKF

SEQ ID NO: 4269 - protein, 19 aa, Artificial
  Short Peptide
FWKLLKKIPPKFKHSAKKF

SEQ ID NO: 4270 - protein, 19 aa, Artificial
  Short Peptide
KKKKLKKIPPKFKHSAKKF

SEQ ID NO: 4271 - protein, 19 aa, Artificial
  Short Peptide
RKKKLKKIPPKFKHSAKKF

SEQ ID NO: 4272 - protein, 19 aa, Artificial
  Short Peptide
FKKKLKKIPPKFKHSAKKF

SEQ ID NO: 4273 - protein, 19 aa, Artificial
  Short Peptide
KWKKLKKIPPKFKHSAKKF

SEQ ID NO: 4274 - protein, 19 aa, Artificial
  Short Peptide
RWKKLKKIPPKFKHSAKKF

SEQ ID NO: 4275 - protein, 19 aa, Artificial
  Short Peptide
FWKKLKKIPPKFKHSAKKF

SEQ ID NO: 4276 - protein, 18 aa, Artificial
  Short Peptide
KKKLFLKIPKFKHSAKKF

SEQ ID NO: 4277 - protein, 18 aa, Artificial
  Short Peptide
RKKLFLKIPKFKHSAKKF

SEQ ID NO: 4278 - protein, 18 aa, Artificial
  Short Peptide
FKKLFLKIPKFKHSAKKF

SEQ ID NO: 4279 - protein, 18 aa, Artificial
  Short Peptide
KWKLFLKIPKFKHSAKKF

SEQ ID NO: 4280 - protein, 18 aa, Artificial
  Short Peptide
RWKLFLKIPKFKHSAKKF

SEQ ID NO: 4281 - protein, 18 aa, Artificial
  Short Peptide
FWKLFLKIPKFKHSAKKF

SEQ ID NO: 4282 - protein, 18 aa, Artificial
  Short Peptide
KKKKFLKIPKFKHSAKKF

SEQ ID NO: 4283 - protein, 18 aa, Artificial
  Short Peptide
RKKKFLKIPKFKHSAKKF

SEQ ID NO: 4284 - protein, 18 aa, Artificial
  Short Peptide
FKKKFLKIPKFKHSAKKF

SEQ ID NO: 4285 - protein, 18 aa, Artificial
  Short Peptide
KWKKFLKIPKFKHSAKKF

SEQ ID NO: 4286 - protein, 18 aa, Artificial
  Short Peptide
RWKKFLKIPKFKHSAKKF

SEQ ID NO: 4287 - protein, 18 aa, Artificial
  Short Peptide
FWKKFLKIPKFKHSAKKF

SEQ ID NO: 4288 - protein, 18 aa, Artificial
  Short Peptide
KKKLLLKIPKFKHSAKKF

SEQ ID NO: 4289 - protein, 18 aa, Artificial
  Short Peptide
RKKLLLKIPKFKHSAKKF

SEQ ID NO: 4290 - protein, 18 aa, Artificial
  Short Peptide
FKKLLLKIPKFKHSAKKF

SEQ ID NO: 4291 - protein, 18 aa, Artificial
  Short Peptide
KWKLLLKIPKFKHSAKKF

SEQ ID NO: 4292 - protein, 18 aa, Artificial
  Short Peptide
RWKLLLKIPKFKHSAKKF

SEQ ID NO: 4293 - protein, 18 aa, Artificial
  Short Peptide
FWKLLLKIPKFKHSAKKF

SEQ ID NO: 4294 - protein, 18 aa, Artificial
  Short Peptide
KKKKLLKIPKFKHSAKKF

SEQ ID NO: 4295 - protein, 18 aa, Artificial
  Short Peptide
RKKKLLKIPKFKHSAKKF

SEQ ID NO: 4296 - protein, 18 aa, Artificial
  Short Peptide
FKKKLLKIPKFKHSAKKF

SEQ ID NO: 4297 - protein, 18 aa, Artificial
  Short Peptide
KWKKLLKIPKFKHSAKKF

SEQ ID NO: 4298 - protein, 18 aa, Artificial
  Short Peptide
RWKKLLKIPKFKHSAKKF

SEQ ID NO: 4299 - protein, 18 aa, Artificial
  Short Peptide
FWKKLLKIPKFKHSAKKF

SEQ ID NO: 4300 - protein, 18 aa, Artificial
  Short Peptide
KKKLFKKIPKFKHSAKKF

SEQ ID NO: 4301 - protein, 18 aa, Artificial
  Short Peptide
RKKLFKKIPKFKHSAKKF

SEQ ID NO: 4302 - protein, 18 aa, Artificial
  Short Peptide
FKKLFKKIPKFKHSAKKF

SEQ ID NO: 4303 - protein, 18 aa, Artificial
  Short Peptide
KWKLFKKIPKFKHSAKKF

SEQ ID NO: 4304 - protein, 18 aa, Artificial
  Short Peptide
RWKLFKKIPKFKHSAKKF

SEQ ID NO: 4305 - protein, 18 aa, Artificial
  Short Peptide
FWKLFKKIPKFKHSAKKF

SEQ ID NO: 4306 - protein, 18 aa, Artificial
  Short Peptide
KKKKFKKIPKFKHSAKKF

SEQ ID NO: 4307 - protein, 18 aa, Artificial
  Short Peptide
RKKKFKKIPKFKHSAKKF

SEQ ID NO: 4308 - protein, 18 aa, Artificial
  Short Peptide
FKKKFKKIPKFKHSAKKF

SEQ ID NO: 4309 - protein, 18 aa, Artificial
  Short Peptide
KWKKFKKIPKFKHSAKKF

SEQ ID NO: 4310 - protein, 18 aa, Artificial
  Short Peptide
RWKKFKKIPKFKHSAKKF

SEQ ID NO: 4311 - protein, 18 aa, Artificial
  Short Peptide
FWKKFKKIPKFKHSAKKF

SEQ ID NO: 4312 - protein, 18 aa, Artificial
  Short Peptide
KKKLLKKIPKFKHSAKKF

SEQ ID NO: 4313 - protein, 18 aa, Artificial
  Short Peptide
RKKLLKKIPKFKHSAKKF

SEQ ID NO: 4314 - protein, 18 aa, Artificial
  Short Peptide
FKKLLKKIPKFKHSAKKF

SEQ ID NO: 4315 - protein, 18 aa, Artificial
  Short Peptide
KWKLLKKIPKFKHSAKKF

SEQ ID NO: 4316 - protein, 18 aa, Artificial
  Short Peptide
RWKLLKKIPKFKHSAKKF

SEQ ID NO: 4317 - protein, 18 aa, Artificial
  Short Peptide
FWKLLKKIPKFKHSAKKF

SEQ ID NO: 4318 - protein, 18 aa, Artificial
  Short Peptide
KKKKLKKIPKFKHSAKKF

SEQ ID NO: 4319 - protein, 18 aa, Artificial
  Short Peptide
RKKKLKKIPKFKHSAKKF

SEQ ID NO: 4320 - protein, 18 aa, Artificial
  Short Peptide
FKKKLKKIPKFKHSAKKF

SEQ ID NO: 4321 - protein, 18 aa, Artificial
  Short Peptide
KWKKLKKIPKFKHSAKKF

SEQ ID NO: 4322 - protein, 18 aa, Artificial
  Short Peptide
RWKKLKKIPKFKHSAKKF

SEQ ID NO: 4323 - protein, 18 aa, Artificial
  Short Peptide
FWKKLKKIPKFKHSAKKF

SEQ ID NO: 4324 - protein, 20 aa, Artificial
  Short Peptide
KKKLFLKIPPPKFLKSAKKF

SEQ ID NO: 4325 - protein, 20 aa, Artificial
  Short Peptide
RKKLFLKIPPPKFLKSAKKF

SEQ ID NO: 4326 - protein, 20 aa, Artificial
  Short Peptide
FKKLFLKIPPPKFLKSAKKF

SEQ ID NO: 4327 - protein, 20 aa, Artificial
  Short Peptide
KWKLFLKIPPPKFLKSAKKF

SEQ ID NO: 4328 - protein, 20 aa, Artificial
  Short Peptide
RWKLFLKIPPPKFLKSAKKF

SEQ ID NO: 4329 - protein, 20 aa, Artificial
  Short Peptide
FWKLFLKIPPPKFLKSAKKF

SEQ ID NO: 4330 - protein, 20 aa, Artificial
  Short Peptide
KKKKFLKIPPPKFLKSAKKF

SEQ ID NO: 4331 - protein, 20 aa, Artificial
  Short Peptide
RKKKFLKIPPPKFLKSAKKF

SEQ ID NO: 4332 - protein, 20 aa, Artificial
  Short Peptide
FKKKFLKIPPPKFLKSAKKF

SEQ ID NO: 4333 - protein, 20 aa, Artificial
  Short Peptide
KWKKFLKIPPPKFLKSAKKF

SEQ ID NO: 4334 - protein, 20 aa, Artificial
  Short Peptide
RWKKFLKIPPPKFLKSAKKF

SEQ ID NO: 4335 - protein, 20 aa, Artificial
  Short Peptide
FWKKFLKIPPPKFLKSAKKF

SEQ ID NO: 4336 - protein, 20 aa, Artificial
  Short Peptide
KKKLLLKIPPPKFLKSAKKF

SEQ ID NO: 4337 - protein, 20 aa, Artificial
  Short Peptide
RKKLLLKIPPPKFLKSAKKF

SEQ ID NO: 4338 - protein, 20 aa, Artificial
  Short Peptide
FKKLLLKIPPPKFLKSAKKF

SEQ ID NO: 4339 - protein, 20 aa, Artificial
  Short Peptide
KWKLLLKIPPPKFLKSAKKF

SEQ ID NO: 4340 - protein, 20 aa, Artificial
  Short Peptide
RWKLLLKIPPPKFLKSAKKF

SEQ ID NO: 4341 - protein, 20 aa, Artificial
  Short Peptide
FWKLLLKIPPPKFLKSAKKF

SEQ ID NO: 4342 - protein, 20 aa, Artificial
  Short Peptide
KKKKLLKIPPPKFLKSAKKF

SEQ ID NO: 4343 - protein, 20 aa, Artificial
  Short Peptide
RKKKLLKIPPPKFLKSAKKF

SEQ ID NO: 4344 - protein, 20 aa, Artificial
  Short Peptide
FKKKLLKIPPPKFLKSAKKF

SEQ ID NO: 4345 - protein, 20 aa, Artificial
  Short Peptide
KWKKLLKIPPPKFLKSAKKF

SEQ ID NO: 4346 - protein, 20 aa, Artificial
  Short Peptide
RWKKLLKIPPPKFLKSAKKF

SEQ ID NO: 4347 - protein, 20 aa, Artificial
  Short Peptide
FWKKLLKIPPPKFLKSAKKF

SEQ ID NO: 4348 - protein, 20 aa, Artificial
  Short Peptide
KKKLFKKIPPPKFLKSAKKF

SEQ ID NO: 4349 - protein, 20 aa, Artificial
  Short Peptide
RKKLFKKIPPPKFLKSAKKF

SEQ ID NO: 4350 - protein, 20 aa, Artificial
  Short Peptide
FKKLFKKIPPPKFLKSAKKF

SEQ ID NO: 4351 - protein, 20 aa, Artificial
  Short Peptide
KWKLFKKIPPPKFLKSAKKF

SEQ ID NO: 4352 - protein, 20 aa, Artificial
  Short Peptide
RWKLFKKIPPPKFLKSAKKF

SEQ ID NO: 4353 - protein, 20 aa, Artificial
  Short Peptide
FWKLFKKIPPPKFLKSAKKF

SEQ ID NO: 4354 - protein, 20 aa, Artificial
  Short Peptide
KKKKFKKIPPPKFLKSAKKF

SEQ ID NO: 4355 - protein, 20 aa, Artificial
  Short Peptide
RKKKFKKIPPPKFLKSAKKF

SEQ ID NO: 4356 - protein, 20 aa, Artificial
  Short Peptide
FKKKFKKIPPPKFLKSAKKF

SEQ ID NO: 4357 - protein, 20 aa, Artificial
  Short Peptide
KWKKFKKIPPPKFLKSAKKF

SEQ ID NO: 4358 - protein, 20 aa, Artificial
  Short Peptide
RWKKFKKIPPPKFLKSAKKF

SEQ ID NO: 4359 - protein, 20 aa, Artificial
  Short Peptide
FWKKFKKIPPPKFLKSAKKF

SEQ ID NO: 4360 - protein, 20 aa, Artificial
  Short Peptide
KKKLLKKIPPPKFLKSAKKF

SEQ ID NO: 4361 - protein, 20 aa, Artificial
  Short Peptide
RKKLLKKIPPPKFLKSAKKF

SEQ ID NO: 4362 - protein, 20 aa, Artificial
  Short Peptide
FKKLLKKIPPPKFLKSAKKF

SEQ ID NO: 4363 - protein, 20 aa, Artificial
  Short Peptide
KWKLLKKIPPPKFLKSAKKF

SEQ ID NO: 4364 - protein, 20 aa, Artificial
  Short Peptide
RWKLLKKIPPPKFLKSAKKF

SEQ ID NO: 4365 - protein, 20 aa, Artificial
  Short Peptide
FWKLLKKIPPPKFLKSAKKF

SEQ ID NO: 4366 - protein, 20 aa, Artificial
  Short Peptide
KKKKLKKIPPPKFLKSAKKF

SEQ ID NO: 4367 - protein, 20 aa, Artificial
  Short Peptide
RKKKLKKIPPPKFLKSAKKF

SEQ ID NO: 4368 - protein, 20 aa, Artificial
  Short Peptide
FKKKLKKIPPPKFLKSAKKF

SEQ ID NO: 4369 - protein, 20 aa, Artificial
  Short Peptide
KWKKLKKIPPPKFLKSAKKF

SEQ ID NO: 4370 - protein, 20 aa, Artificial
  Short Peptide
RWKKLKKIPPPKFLKSAKKF

SEQ ID NO: 4371 - protein, 20 aa, Artificial
  Short Peptide
FWKKLKKIPPPKFLKSAKKF

SEQ ID NO: 4372 - protein, 19 aa, Artificial
  Short Peptide
KKKLFLKIPPKFLKSAKKF

SEQ ID NO: 4373 - protein, 19 aa, Artificial
  Short Peptide
RKKLFLKIPPKFLKSAKKF

SEQ ID NO: 4374 - protein, 19 aa, Artificial
  Short Peptide
FKKLFLKIPPKFLKSAKKF

SEQ ID NO: 4375 - protein, 19 aa, Artificial
  Short Peptide
KWKLFLKIPPKFLKSAKKF

SEQ ID NO: 4376 - protein, 19 aa, Artificial
  Short Peptide
RWKLFLKIPPKFLKSAKKF

SEQ ID NO: 4377 - protein, 19 aa, Artificial
  Short Peptide
FWKLFLKIPPKFLKSAKKF

SEQ ID NO: 4378 - protein, 19 aa, Artificial
  Short Peptide
KKKKFLKIPPKFLKSAKKF

SEQ ID NO: 4379 - protein, 19 aa, Artificial
  Short Peptide
RKKKFLKIPPKFLKSAKKF

SEQ ID NO: 4380 - protein, 19 aa, Artificial
  Short Peptide
FKKKFLKIPPKFLKSAKKF

SEQ ID NO: 4381 - protein, 19 aa, Artificial
  Short Peptide
KWKKFLKIPPKFLKSAKKF

SEQ ID NO: 4382 - protein, 19 aa, Artificial
  Short Peptide
RWKKFLKIPPKFLKSAKKF

SEQ ID NO: 4383 - protein, 19 aa, Artificial
  Short Peptide
FWKKFLKIPPKFLKSAKKF

SEQ ID NO: 4384 - protein, 19 aa, Artificial
  Short Peptide
KKKLLLKIPPKFLKSAKKF

SEQ ID NO: 4385 - protein, 19 aa, Artificial
  Short Peptide
RKKLLLKIPPKFLKSAKKF

SEQ ID NO: 4386 - protein, 19 aa, Artificial
  Short Peptide
FKKLLLKIPPKFLKSAKKF

SEQ ID NO: 4387 - protein, 19 aa, Artificial
  Short Peptide
KWKLLLKIPPKFLKSAKKF

SEQ ID NO: 4388 - protein, 19 aa, Artificial
  Short Peptide
RWKLLLKIPPKFLKSAKKF

SEQ ID NO: 4389 - protein, 19 aa, Artificial
  Short Peptide
FWKLLLKIPPKFLKSAKKF

SEQ ID NO: 4390 - protein, 19 aa, Artificial
  Short Peptide
KKKKLLKIPPKFLKSAKKF

SEQ ID NO: 4391 - protein, 19 aa, Artificial
  Short Peptide
RKKKLLKIPPKFLKSAKKF

SEQ ID NO: 4392 - protein, 19 aa, Artificial
  Short Peptide
FKKKLLKIPPKFLKSAKKF

SEQ ID NO: 4393 - protein, 19 aa, Artificial
  Short Peptide
KWKKLLKIPPKFLKSAKKF

SEQ ID NO: 4394 - protein, 19 aa, Artificial
  Short Peptide
RWKKLLKIPPKFLKSAKKF

SEQ ID NO: 4395 - protein, 19 aa, Artificial
  Short Peptide
FWKKLLKIPPKFLKSAKKF

SEQ ID NO: 4396 - protein, 19 aa, Artificial
  Short Peptide
KKKLFKKIPPKFLKSAKKF

SEQ ID NO: 4397 - protein, 19 aa, Artificial
  Short Peptide
RKKLFKKIPPKFLKSAKKF

SEQ ID NO: 4398 - protein, 19 aa, Artificial
  Short Peptide
FKKLFKKIPPKFLKSAKKF

SEQ ID NO: 4399 - protein, 19 aa, Artificial
  Short Peptide
KWKLFKKIPPKFLKSAKKF

SEQ ID NO: 4400 - protein, 19 aa, Artificial
  Short Peptide
RWKLFKKIPPKFLKSAKKF

SEQ ID NO: 4401 - protein, 19 aa, Artificial
  Short Peptide
FWKLFKKIPPKFLKSAKKF

SEQ ID NO: 4402 - protein, 19 aa, Artificial
  Short Peptide
KKKKFKKIPPKFLKSAKKF

SEQ ID NO: 4403 - protein, 19 aa, Artificial
  Short Peptide
RKKKFKKIPPKFLKSAKKF

SEQ ID NO: 4404 - protein, 19 aa, Artificial
  Short Peptide
FKKKFKKIPPKFLKSAKKF

SEQ ID NO: 4405 - protein, 19 aa, Artificial
  Short Peptide
KWKKFKKIPPKFLKSAKKF

SEQ ID NO: 4406 - protein, 19 aa, Artificial
  Short Peptide
RWKKFKKIPPKFLKSAKKF

SEQ ID NO: 4407 - protein, 19 aa, Artificial
  Short Peptide
FWKKFKKIPPKFLKSAKKF

SEQ ID NO: 4408 - protein, 19 aa, Artificial
  Short Peptide
KKKLLKKIPPKFLKSAKKF

SEQ ID NO: 4409 - protein, 19 aa, Artificial
  Short Peptide
RKKLLKKIPPKFLKSAKKF

SEQ ID NO: 4410 - protein, 19 aa, Artificial
  Short Peptide
FKKLLKKIPPKFLKSAKKF

SEQ ID NO: 4411 - protein, 19 aa, Artificial
  Short Peptide
KWKLLKKIPPKFLKSAKKF

SEQ ID NO: 4412 - protein, 19 aa, Artificial
  Short Peptide
RWKLLKKIPPKFLKSAKKF

SEQ ID NO: 4413 - protein, 19 aa, Artificial
  Short Peptide
FWKLLKKIPPKFLKSAKKF

SEQ ID NO: 4414 - protein, 19 aa, Artificial
  Short Peptide
KKKKLKKIPPKFLKSAKKF

SEQ ID NO: 4415 - protein, 19 aa, Artificial
  Short Peptide
RKKKLKKIPPKFLKSAKKF

SEQ ID NO: 4416 - protein, 19 aa, Artificial
  Short Peptide
FKKKLKKIPPKFLKSAKKF

SEQ ID NO: 4417 - protein, 19 aa, Artificial
  Short Peptide
KWKKLKKIPPKFLKSAKKF

SEQ ID NO: 4418 - protein, 19 aa, Artificial
  Short Peptide
RWKKLKKIPPKFLKSAKKF

SEQ ID NO: 4419 - protein, 19 aa, Artificial
  Short Peptide
FWKKLKKIPPKFLKSAKKF

SEQ ID NO: 4420 - protein, 18 aa, Artificial
  Short Peptide
KKKLFLKIPKFLKSAKKF

SEQ ID NO: 4421 - protein, 18 aa, Artificial
  Short Peptide
RKKLFLKIPKFLKSAKKF

SEQ ID NO: 4422 - protein, 18 aa, Artificial
  Short Peptide
FKKLFLKIPKFLKSAKKF

SEQ ID NO: 4423 - protein, 18 aa, Artificial
  Short Peptide
KWKLFLKIPKFLKSAKKF

SEQ ID NO: 4424 - protein, 18 aa, Artificial
  Short Peptide
RWKLFLKIPKFLKSAKKF

SEQ ID NO: 4425 - protein, 18 aa, Artificial
  Short Peptide
FWKLFLKIPKFLKSAKKF

SEQ ID NO: 4426 - protein, 18 aa, Artificial
  Short Peptide
KKKKFLKIPKFLKSAKKF

SEQ ID NO: 4427 - protein, 18 aa, Artificial
  Short Peptide
RKKKFLKIPKFLKSAKKF

SEQ ID NO: 4428 - protein, 18 aa, Artificial
  Short Peptide
FKKKFLKIPKFLKSAKKF

SEQ ID NO: 4429 - protein, 18 aa, Artificial
  Short Peptide
KWKKFLKIPKFLKSAKKF

SEQ ID NO: 4430 - protein, 18 aa, Artificial
  Short Peptide
RWKKFLKIPKFLKSAKKF

SEQ ID NO: 4431 - protein, 18 aa, Artificial
  Short Peptide
FWKKFLKIPKFLKSAKKF

SEQ ID NO: 4432 - protein, 18 aa, Artificial
  Short Peptide
KKKLLLKIPKFLKSAKKF

SEQ ID NO: 4433 - protein, 18 aa, Artificial
  Short Peptide
RKKLLLKIPKFLKSAKKF

SEQ ID NO: 4434 - protein, 18 aa, Artificial
  Short Peptide
FKKLLLKIPKFLKSAKKF

SEQ ID NO: 4435 - protein, 18 aa, Artificial
  Short Peptide
KWKLLLKIPKFLKSAKKF

SEQ ID NO: 4436 - protein, 18 aa, Artificial
  Short Peptide
RWKLLLKIPKFLKSAKKF

SEQ ID NO: 4437 - protein, 18 aa, Artificial
  Short Peptide
FWKLLLKIPKFLKSAKKF

SEQ ID NO: 4438 - protein, 18 aa, Artificial
  Short Peptide
KKKKLLKIPKFLKSAKKF

SEQ ID NO: 4439 - protein, 18 aa, Artificial
  Short Peptide
RKKKLLKIPKFLKSAKKF

SEQ ID NO: 4440 - protein, 18 aa, Artificial
  Short Peptide
FKKKLLKIPKFLKSAKKF

SEQ ID NO: 4441 - protein, 18 aa, Artificial
  Short Peptide
KWKKLLKIPKFLKSAKKF

SEQ ID NO: 4442 - protein, 18 aa, Artificial
  Short Peptide
RWKKLLKIPKFLKSAKKF

SEQ ID NO: 4443 - protein, 18 aa, Artificial
  Short Peptide
FWKKLLKIPKFLKSAKKF

SEQ ID NO: 4444 - protein, 18 aa, Artificial
  Short Peptide
KKKLFKKIPKFLKSAKKF

SEQ ID NO: 4445 - protein, 18 aa, Artificial
  Short Peptide
RKKLFKKIPKFLKSAKKF

SEQ ID NO: 4446 - protein, 18 aa, Artificial
  Short Peptide
FKKLFKKIPKFLKSAKKF

SEQ ID NO: 4447 - protein, 18 aa, Artificial
  Short Peptide
KWKLFKKIPKFLKSAKKF

SEQ ID NO: 4448 - protein, 18 aa, Artificial
  Short Peptide
RWKLFKKIPKFLKSAKKF

SEQ ID NO: 4449 - protein, 18 aa, Artificial
  Short Peptide
FWKLFKKIPKFLKSAKKF

SEQ ID NO: 4450 - protein, 18 aa, Artificial
  Short Peptide
KKKKFKKIPKFLKSAKKF

SEQ ID NO: 4451 - protein, 18 aa, Artificial
  Short Peptide
RKKKFKKIPKFLKSAKKF

SEQ ID NO: 4452 - protein, 18 aa, Artificial
  Short Peptide
FKKKFKKIPKFLKSAKKF

SEQ ID NO: 4453 - protein, 18 aa, Artificial
  Short Peptide
KWKKFKKIPKFLKSAKKF

SEQ ID NO: 4454 - protein, 18 aa, Artificial
  Short Peptide
RWKKFKKIPKFLKSAKKF

SEQ ID NO: 4455 - protein, 18 aa, Artificial
  Short Peptide
FWKKFKKIPKFLKSAKKF

SEQ ID NO: 4456 - protein, 18 aa, Artificial
  Short Peptide
KKKLLKKIPKFLKSAKKF

SEQ ID NO: 4457 - protein, 18 aa, Artificial
  Short Peptide
RKKLLKKIPKFLKSAKKF

SEQ ID NO: 4458 - protein, 18 aa, Artificial
  Short Peptide
FKKLLKKIPKFLKSAKKF

SEQ ID NO: 4459 - protein, 18 aa, Artificial
  Short Peptide
KWKLLKKIPKFLKSAKKF

SEQ ID NO: 4460 - protein, 18 aa, Artificial
  Short Peptide
RWKLLKKIPKFLKSAKKF

SEQ ID NO: 4461 - protein, 18 aa, Artificial
  Short Peptide
FWKLLKKIPKFLKSAKKF

SEQ ID NO: 4462 - protein, 18 aa, Artificial
  Short Peptide
KKKKLKKIPKFLKSAKKF

SEQ ID NO: 4463 - protein, 18 aa, Artificial
  Short Peptide
RKKKLKKIPKFLKSAKKF

SEQ ID NO: 4464 - protein, 18 aa, Artificial
  Short Peptide
FKKKLKKIPKFLKSAKKF

SEQ ID NO: 4465 - protein, 18 aa, Artificial
  Short Peptide
KWKKLKKIPKFLKSAKKF

SEQ ID NO: 4466 - protein, 18 aa, Artificial
  Short Peptide
RWKKLKKIPKFLKSAKKF

SEQ ID NO: 4467 - protein, 18 aa, Artificial
  Short Peptide
FWKKLKKIPKFLKSAKKF

SEQ ID NO: 4468 - protein, 20 aa, Artificial
  Short Peptide
KKKLFLKIPPPKFKKSAKKF

SEQ ID NO: 4469 - protein, 20 aa, Artificial
  Short Peptide
RKKLFLKIPPPKFKKSAKKF

SEQ ID NO: 4470 - protein, 20 aa, Artificial
  Short Peptide
FKKLFLKIPPPKFKKSAKKF

SEQ ID NO: 4471 - protein, 20 aa, Artificial
  Short Peptide
KWKLFLKIPPPKFKKSAKKF

SEQ ID NO: 4472 - protein, 20 aa, Artificial
  Short Peptide
RWKLFLKIPPPKFKKSAKKF

SEQ ID NO: 4473 - protein, 20 aa, Artificial
  Short Peptide
FWKLFLKIPPPKFKKSAKKF

SEQ ID NO: 4474 - protein, 20 aa, Artificial
  Short Peptide
KKKKFLKIPPPKFKKSAKKF

SEQ ID NO: 4475 - protein, 20 aa, Artificial
  Short Peptide
RKKKFLKIPPPKFKKSAKKF

SEQ ID NO: 4476 - protein, 20 aa, Artificial
  Short Peptide
FKKKFLKIPPPKFKKSAKKF

SEQ ID NO: 4477 - protein, 20 aa, Artificial
  Short Peptide
KWKKFLKIPPPKFKKSAKKF

SEQ ID NO: 4478 - protein, 20 aa, Artificial
  Short Peptide
RWKKFLKIPPPKFKKSAKKF

SEQ ID NO: 4479 - protein, 20 aa, Artificial
  Short Peptide
FWKKFLKIPPPKFKKSAKKF

SEQ ID NO: 4480 - protein, 20 aa, Artificial
  Short Peptide
KKKLLLKIPPPKFKKSAKKF

SEQ ID NO: 4481 - protein, 20 aa, Artificial
  Short Peptide
RKKLLLKIPPPKFKKSAKKF

SEQ ID NO: 4482 - protein, 20 aa, Artificial
  Short Peptide
FKKLLLKIPPPKFKKSAKKF

SEQ ID NO: 4483 - protein, 20 aa, Artificial
  Short Peptide
KWKLLLKIPPPKFKKSAKKF

SEQ ID NO: 4484 - protein, 20 aa, Artificial
  Short Peptide
RWKLLLKIPPPKFKKSAKKF

SEQ ID NO: 4485 - protein, 20 aa, Artificial
  Short Peptide
FWKLLLKIPPPKFKKSAKKF

SEQ ID NO: 4486 - protein, 20 aa, Artificial
  Short Peptide
KKKKLLKIPPPKFKKSAKKF

SEQ ID NO: 4487 - protein, 20 aa, Artificial
  Short Peptide
RKKKLLKIPPPKFKKSAKKF

SEQ ID NO: 4488 - protein, 20 aa, Artificial
  Short Peptide
FKKKLLKIPPPKFKKSAKKF

SEQ ID NO: 4489 - protein, 20 aa, Artificial
  Short Peptide
KWKKLLKIPPPKFKKSAKKF

SEQ ID NO: 4490 - protein, 20 aa, Artificial
  Short Peptide
RWKKLLKIPPPKFKKSAKKF

SEQ ID NO: 4491 - protein, 20 aa, Artificial
  Short Peptide
FWKKLLKIPPPKFKKSAKKF

SEQ ID NO: 4492 - protein, 20 aa, Artificial
  Short Peptide
KKKLFKKIPPPKFKKSAKKF

SEQ ID NO: 4493 - protein, 20 aa, Artificial
  Short Peptide
RKKLFKKIPPPKFKKSAKKF

SEQ ID NO: 4494 - protein, 20 aa, Artificial
  Short Peptide
FKKLFKKIPPPKFKKSAKKF

SEQ ID NO: 4495 - protein, 20 aa, Artificial
  Short Peptide
KWKLFKKIPPPKFKKSAKKF

SEQ ID NO: 4496 - protein, 20 aa, Artificial
  Short Peptide
RWKLFKKIPPPKFKKSAKKF

SEQ ID NO: 4497 - protein, 20 aa, Artificial
  Short Peptide
FWKLFKKIPPPKFKKSAKKF

SEQ ID NO: 4498 - protein, 20 aa, Artificial
  Short Peptide
KKKKFKKIPPPKFKKSAKKF

SEQ ID NO: 4499 - protein, 20 aa, Artificial
  Short Peptide
RKKKFKKIPPPKFKKSAKKF

SEQ ID NO: 4500 - protein, 20 aa, Artificial
  Short Peptide
FKKKFKKIPPPKFKKSAKKF

SEQ ID NO: 4501 - protein, 20 aa, Artificial
  Short Peptide
KWKKFKKIPPPKFKKSAKKF

SEQ ID NO: 4502 - protein, 20 aa, Artificial
  Short Peptide
RWKKFKKIPPPKFKKSAKKF

SEQ ID NO: 4503 - protein, 20 aa, Artificial
  Short Peptide
FWKKFKKIPPPKFKKSAKKF

SEQ ID NO: 4504 - protein, 20 aa, Artificial
  Short Peptide
KKKLLKKIPPPKFKKSAKKF

SEQ ID NO: 4505 - protein, 20 aa, Artificial
  Short Peptide
RKKLLKKIPPPKFKKSAKKF

SEQ ID NO: 4506 - protein, 20 aa, Artificial
  Short Peptide
FKKLLKKIPPPKFKKSAKKF

SEQ ID NO: 4507 - protein, 20 aa, Artificial
  Short Peptide
KWKLLKKIPPPKFKKSAKKF

SEQ ID NO: 4508 - protein, 20 aa, Artificial
  Short Peptide
RWKLLKKIPPPKFKKSAKKF

SEQ ID NO: 4509 - protein, 20 aa, Artificial
  Short Peptide
FWKLLKKIPPPKFKKSAKKF

SEQ ID NO: 4510 - protein, 20 aa, Artificial
  Short Peptide
KKKKLKKIPPPKFKKSAKKF

SEQ ID NO: 4511 - protein, 20 aa, Artificial
  Short Peptide
RKKKLKKIPPPKFKKSAKKF

SEQ ID NO: 4512 - protein, 20 aa, Artificial
  Short Peptide
FKKKLKKIPPPKFKKSAKKF

SEQ ID NO: 4513 - protein, 20 aa, Artificial
  Short Peptide
KWKKLKKIPPPKFKKSAKKF

SEQ ID NO: 4514 - protein, 20 aa, Artificial
  Short Peptide
RWKKLKKIPPPKFKKSAKKF

SEQ ID NO: 4515 - protein, 20 aa, Artificial
  Short Peptide
FWKKLKKIPPPKFKKSAKKF

SEQ ID NO: 4516 - protein, 19 aa, Artificial
  Short Peptide
KKKLFLKIPPKFKKSAKKF

SEQ ID NO: 4517 - protein, 19 aa, Artificial
  Short Peptide
RKKLFLKIPPKFKKSAKKF

SEQ ID NO: 4518 - protein, 19 aa, Artificial
  Short Peptide
FKKLFLKIPPKFKKSAKKF

SEQ ID NO: 4519 - protein, 19 aa, Artificial
  Short Peptide
KWKLFLKIPPKFKKSAKKF

SEQ ID NO: 4520 - protein, 19 aa, Artificial
  Short Peptide
RWKLFLKIPPKFKKSAKKF

SEQ ID NO: 4521 - protein, 19 aa, Artificial
  Short Peptide
FWKLFLKIPPKFKKSAKKF

SEQ ID NO: 4522 - protein, 19 aa, Artificial
  Short Peptide
KKKKFLKIPPKFKKSAKKF

SEQ ID NO: 4523 - protein, 19 aa, Artificial
  Short Peptide
RKKKFLKIPPKFKKSAKKF

SEQ ID NO: 4524 - protein, 19 aa, Artificial
  Short Peptide
FKKKFLKIPPKFKKSAKKF

SEQ ID NO: 4525 - protein, 19 aa, Artificial
  Short Peptide
KWKKFLKIPPKFKKSAKKF

SEQ ID NO: 4526 - protein, 19 aa, Artificial
  Short Peptide
RWKKFLKIPPKFKKSAKKF

SEQ ID NO: 4527 - protein, 19 aa, Artificial
  Short Peptide
FWKKFLKIPPKFKKSAKKF

SEQ ID NO: 4528 - protein, 19 aa, Artificial
  Short Peptide
KKKLLLKIPPKFKKSAKKF

SEQ ID NO: 4529 - protein, 19 aa, Artificial
  Short Peptide
RKKLLLKIPPKFKKSAKKF

SEQ ID NO: 4530 - protein, 19 aa, Artificial
  Short Peptide
FKKLLLKIPPKFKKSAKKF

SEQ ID NO: 4531 - protein, 19 aa, Artificial
  Short Peptide
KWKLLLKIPPKFKKSAKKF

SEQ ID NO: 4532 - protein, 19 aa, Artificial
  Short Peptide
RWKLLLKIPPKFKKSAKKF

SEQ ID NO: 4533 - protein, 19 aa, Artificial
  Short Peptide
FWKLLLKIPPKFKKSAKKF

SEQ ID NO: 4534 - protein, 19 aa, Artificial
  Short Peptide
KKKKLLKIPPKFKKSAKKF

SEQ ID NO: 4535 - protein, 19 aa, Artificial
  Short Peptide
RKKKLLKIPPKFKKSAKKF

SEQ ID NO: 4536 - protein, 19 aa, Artificial
  Short Peptide
FKKKLLKIPPKFKKSAKKF

SEQ ID NO: 4537 - protein, 19 aa, Artificial
  Short Peptide
KWKKLLKIPPKFKKSAKKF

SEQ ID NO: 4538 - protein, 19 aa, Artificial
  Short Peptide
RWKKLLKIPPKFKKSAKKF

SEQ ID NO: 4539 - protein, 19 aa, Artificial
  Short Peptide
FWKKLLKIPPKFKKSAKKF

SEQ ID NO: 4540 - protein, 19 aa, Artificial
  Short Peptide
KKKLFKKIPPKFKKSAKKF

SEQ ID NO: 4541 - protein, 19 aa, Artificial
  Short Peptide
RKKLFKKIPPKFKKSAKKF

SEQ ID NO: 4542 - protein, 19 aa, Artificial
  Short Peptide
FKKLFKKIPPKFKKSAKKF

SEQ ID NO: 4543 - protein, 19 aa, Artificial
  Short Peptide
KWKLFKKIPPKFKKSAKKF

SEQ ID NO: 4544 - protein, 19 aa, Artificial
  Short Peptide
RWKLFKKIPPKFKKSAKKF

SEQ ID NO: 4545 - protein, 19 aa, Artificial
  Short Peptide
FWKLFKKIPPKFKKSAKKF

SEQ ID NO: 4546 - protein, 19 aa, Artificial
  Short Peptide
KKKKFKKIPPKFKKSAKKF

SEQ ID NO: 4547 - protein, 19 aa, Artificial
  Short Peptide
RKKKFKKIPPKFKKSAKKF

SEQ ID NO: 4548 - protein, 19 aa, Artificial
  Short Peptide
FKKKFKKIPPKFKKSAKKF

SEQ ID NO: 4549 - protein, 19 aa, Artificial
  Short Peptide
KWKKFKKIPPKFKKSAKKF

SEQ ID NO: 4550 - protein, 19 aa, Artificial
  Short Peptide
RWKKFKKIPPKFKKSAKKF

SEQ ID NO: 4551 - protein, 19 aa, Artificial
  Short Peptide
FWKKFKKIPPKFKKSAKKF

SEQ ID NO: 4552 - protein, 19 aa, Artificial
  Short Peptide
KKKLLKKIPPKFKKSAKKF

SEQ ID NO: 4553 - protein, 19 aa, Artificial
  Short Peptide
RKKLLKKIPPKFKKSAKKF

SEQ ID NO: 4554 - protein, 19 aa, Artificial
  Short Peptide
FKKLLKKIPPKFKKSAKKF

SEQ ID NO: 4555 - protein, 19 aa, Artificial
  Short Peptide
KWKLLKKIPPKFKKSAKKF

SEQ ID NO: 4556 - protein, 19 aa, Artificial
  Short Peptide
RWKLLKKIPPKFKKSAKKF

SEQ ID NO: 4557 - protein, 19 aa, Artificial
  Short Peptide
FWKLLKKIPPKFKKSAKKF

SEQ ID NO: 4558 - protein, 19 aa, Artificial
  Short Peptide
KKKKLKKIPPKFKKSAKKF

SEQ ID NO: 4559 - protein, 19 aa, Artificial
  Short Peptide
RKKKLKKIPPKFKKSAKKF

SEQ ID NO: 4560 - protein, 19 aa, Artificial
  Short Peptide
FKKKLKKIPPKFKKSAKKF

SEQ ID NO: 4561 - protein, 19 aa, Artificial
  Short Peptide
KWKKLKKIPPKFKKSAKKF

SEQ ID NO: 4562 - protein, 19 aa, Artificial
  Short Peptide
RWKKLKKIPPKFKKSAKKF

SEQ ID NO: 4563 - protein, 19 aa, Artificial
  Short Peptide
FWKKLKKIPPKFKKSAKKF

SEQ ID NO: 4564 - protein, 18 aa, Artificial
  Short Peptide
KKKLFLKIPKFKKSAKKF

SEQ ID NO: 4565 - protein, 18 aa, Artificial
  Short Peptide
RKKLFLKIPKFKKSAKKF

SEQ ID NO: 4566 - protein, 18 aa, Artificial
  Short Peptide
FKKLFLKIPKFKKSAKKF

SEQ ID NO: 4567 - protein, 18 aa, Artificial
  Short Peptide
KWKLFLKIPKFKKSAKKF

SEQ ID NO: 4568 - protein, 18 aa, Artificial
  Short Peptide
RWKLFLKIPKFKKSAKKF

SEQ ID NO: 4569 - protein, 18 aa, Artificial
  Short Peptide
FWKLFLKIPKFKKSAKKF

SEQ ID NO: 4570 - protein, 18 aa, Artificial
  Short Peptide
KKKKFLKIPKFKKSAKKF

SEQ ID NO: 4571 - protein, 18 aa, Artificial
  Short Peptide
RKKKFLKIPKFKKSAKKF

SEQ ID NO: 4572 - protein, 18 aa, Artificial
  Short Peptide
FKKKFLKIPKFKKSAKKF

SEQ ID NO: 4573 - protein, 18 aa, Artificial
  Short Peptide
KWKKFLKIPKFKKSAKKF

SEQ ID NO: 4574 - protein, 18 aa, Artificial
  Short Peptide
RWKKFLKIPKFKKSAKKF

SEQ ID NO: 4575 - protein, 18 aa, Artificial
  Short Peptide
FWKKFLKIPKFKKSAKKF

SEQ ID NO: 4576 - protein, 18 aa, Artificial
  Short Peptide
KKKLLLKIPKFKKSAKKF

SEQ ID NO: 4577 - protein, 18 aa, Artificial
  Short Peptide
RKKLLLKIPKFKKSAKKF

SEQ ID NO: 4578 - protein, 18 aa, Artificial
  Short Peptide
FKKLLLKIPKFKKSAKKF

SEQ ID NO: 4579 - protein, 18 aa, Artificial
  Short Peptide
KWKLLLKIPKFKKSAKKF

SEQ ID NO: 4580 - protein, 18 aa, Artificial
  Short Peptide
RWKLLLKIPKFKKSAKKF

SEQ ID NO: 4581 - protein, 18 aa, Artificial
  Short Peptide
FWKLLLKIPKFKKSAKKF

SEQ ID NO: 4582 - protein, 18 aa, Artificial
  Short Peptide
KKKKLLKIPKFKKSAKKF

SEQ ID NO: 4583 - protein, 18 aa, Artificial
  Short Peptide
RKKKLLKIPKFKKSAKKF

SEQ ID NO: 4584 - protein, 18 aa, Artificial
  Short Peptide
FKKKLLKIPKFKKSAKKF

SEQ ID NO: 4585 - protein, 18 aa, Artificial
  Short Peptide
KWKKLLKIPKFKKSAKKF

SEQ ID NO: 4586 - protein, 18 aa, Artificial
  Short Peptide
RWKKLLKIPKFKKSAKKF

SEQ ID NO: 4587 - protein, 18 aa, Artificial
  Short Peptide
FWKKLLKIPKFKKSAKKF

SEQ ID NO: 4588 - protein, 18 aa, Artificial
  Short Peptide
KKKLFKKIPKFKKSAKKF

SEQ ID NO: 4589 - protein, 18 aa, Artificial
  Short Peptide
RKKLFKKIPKFKKSAKKF

SEQ ID NO: 4590 - protein, 18 aa, Artificial
  Short Peptide
FKKLFKKIPKFKKSAKKF

SEQ ID NO: 4591 - protein, 18 aa, Artificial
  Short Peptide
KWKLFKKIPKFKKSAKKF

SEQ ID NO: 4592 - protein, 18 aa, Artificial
  Short Peptide
RWKLFKKIPKFKKSAKKF

SEQ ID NO: 4593 - protein, 18 aa, Artificial
  Short Peptide
FWKLFKKIPKFKKSAKKF

SEQ ID NO: 4594 - protein, 18 aa, Artificial
  Short Peptide
KKKKFKKIPKFKKSAKKF

SEQ ID NO: 4595 - protein, 18 aa, Artificial
  Short Peptide
RKKKFKKIPKFKKSAKKF

SEQ ID NO: 4596 - protein, 18 aa, Artificial
  Short Peptide
FKKKFKKIPKFKKSAKKF

SEQ ID NO: 4597 - protein, 18 aa, Artificial
  Short Peptide
KWKKFKKIPKFKKSAKKF

SEQ ID NO: 4598 - protein, 18 aa, Artificial
  Short Peptide
RWKKFKKIPKFKKSAKKF

SEQ ID NO: 4599 - protein, 18 aa, Artificial
  Short Peptide
FWKKFKKIPKFKKSAKKF

SEQ ID NO: 4600 - protein, 18 aa, Artificial
  Short Peptide
KKKLLKKIPKFKKSAKKF

SEQ ID NO: 4601 - protein, 18 aa, Artificial
  Short Peptide
RKKLLKKIPKFKKSAKKF

SEQ ID NO: 4602 - protein, 18 aa, Artificial
  Short Peptide
FKKLLKKIPKFKKSAKKF

SEQ ID NO: 4603 - protein, 18 aa, Artificial
  Short Peptide
KWKLLKKIPKFKKSAKKF

SEQ ID NO: 4604 - protein, 18 aa, Artificial
  Short Peptide
RWKLLKKIPKFKKSAKKF

SEQ ID NO: 4605 - protein, 18 aa, Artificial
  Short Peptide
FWKLLKKIPKFKKSAKKF

SEQ ID NO: 4606 - protein, 18 aa, Artificial
  Short Peptide
KKKKLKKIPKFKKSAKKF

SEQ ID NO: 4607 - protein, 18 aa, Artificial
  Short Peptide
RKKKLKKIPKFKKSAKKF

SEQ ID NO: 4608 - protein, 18 aa, Artificial
  Short Peptide
FKKKLKKIPKFKKSAKKF

SEQ ID NO: 4609 - protein, 18 aa, Artificial
  Short Peptide
KWKKLKKIPKFKKSAKKF

SEQ ID NO: 4610 - protein, 18 aa, Artificial
  Short Peptide
RWKKLKKIPKFKKSAKKF

SEQ ID NO: 4611 - protein, 18 aa, Artificial
  Short Peptide
FWKKLKKIPKFKKSAKKF

SEQ ID NO: 4612 - protein, 20 aa, Artificial
  Short Peptide
KLKLLLKIPPPKFLHAAKKF

SEQ ID NO: 4613 - protein, 20 aa, Artificial
  Short Peptide
KLKKLLKIPPPKFLHAAKKF

SEQ ID NO: 4614 - protein, 20 aa, Artificial
  Short Peptide
KLKLFLKIPPPKFLHAAKKF

SEQ ID NO: 4615 - protein, 20 aa, Artificial
  Short Peptide
KLKKFLKIPPPKFLHAAKKF

SEQ ID NO: 4616 - protein, 20 aa, Artificial
  Short Peptide
KLKLLKKIPPPKFLHAAKKF

SEQ ID NO: 4617 - protein, 20 aa, Artificial
  Short Peptide
KLKKLKKIPPPKFLHAAKKF

SEQ ID NO: 4618 - protein, 20 aa, Artificial
  Short Peptide
KLKLFKKIPPPKFLHAAKKF

SEQ ID NO: 4619 - protein, 20 aa, Artificial
  Short Peptide
KLKKFKKIPPPKFLHAAKKF

SEQ ID NO: 4620 - protein, 19 aa, Artificial
  Short Peptide
KLKLLLKIPPKFLHAAKKF

SEQ ID NO: 4621 - protein, 19 aa, Artificial
  Short Peptide
KLKKLLKIPPKFLHAAKKF

SEQ ID NO: 4622 - protein, 19 aa, Artificial
  Short Peptide
KLKLFLKIPPKFLHAAKKF

SEQ ID NO: 4623 - protein, 19 aa, Artificial
  Short Peptide
KLKKFLKIPPKFLHAAKKF

SEQ ID NO: 4624 - protein, 19 aa, Artificial
  Short Peptide
KLKLLKKIPPKFLHAAKKF

SEQ ID NO: 4625 - protein, 19 aa, Artificial
  Short Peptide
KLKKLKKIPPKFLHAAKKF

SEQ ID NO: 4626 - protein, 19 aa, Artificial
  Short Peptide
KLKLFKKIPPKFLHAAKKF

SEQ ID NO: 4627 - protein, 19 aa, Artificial
  Short Peptide
KLKKFKKIPPKFLHAAKKF

SEQ ID NO: 4628 - protein, 18 aa, Artificial
  Short Peptide
KLKLLLKIPKFLHAAKKF

SEQ ID NO: 4629 - protein, 18 aa, Artificial
  Short Peptide
KLKKLLKIPKFLHAAKKF

SEQ ID NO: 4630 - protein, 18 aa, Artificial
  Short Peptide
KLKLFLKIPKFLHAAKKF

SEQ ID NO: 4631 - protein, 18 aa, Artificial
  Short Peptide
KLKKFLKIPKFLHAAKKF

SEQ ID NO: 4632 - protein, 18 aa, Artificial
  Short Peptide
KLKLLKKIPKFLHAAKKF

SEQ ID NO: 4633 - protein, 18 aa, Artificial
  Short Peptide
KLKKLKKIPKFLHAAKKF

SEQ ID NO: 4634 - protein, 18 aa, Artificial
  Short Peptide
KLKLFKKIPKFLHAAKKF

SEQ ID NO: 4635 - protein, 18 aa, Artificial
  Short Peptide
KLKKFKKIPKFLHAAKKF

SEQ ID NO: 4636 - protein, 20 aa, Artificial
  Short Peptide
KLKLLLKIPPPKFLHVAKKF

SEQ ID NO: 4637 - protein, 20 aa, Artificial
  Short Peptide
KLKKLLKIPPPKFLHVAKKF

SEQ ID NO: 4638 - protein, 20 aa, Artificial
  Short Peptide
KLKLFLKIPPPKFLHVAKKF

SEQ ID NO: 4639 - protein, 20 aa, Artificial
  Short Peptide
KLKKFLKIPPPKFLHVAKKF

SEQ ID NO: 4640 - protein, 20 aa, Artificial
  Short Peptide
KLKLLKKIPPPKFLHVAKKF

SEQ ID NO: 4641 - protein, 20 aa, Artificial
  Short Peptide
KLKKLKKIPPPKFLHVAKKF

SEQ ID NO: 4642 - protein, 20 aa, Artificial
  Short Peptide
KLKLFKKIPPPKFLHVAKKF

SEQ ID NO: 4643 - protein, 20 aa, Artificial
  Short Peptide
KLKKFKKIPPPKFLHVAKKF

SEQ ID NO: 4644 - protein, 19 aa, Artificial
  Short Peptide
KLKLLLKIPPKFLHVAKKF

SEQ ID NO: 4645 - protein, 19 aa, Artificial
  Short Peptide
KLKKLLKIPPKFLHVAKKF

SEQ ID NO: 4646 - protein, 19 aa, Artificial
  Short Peptide
KLKLFLKIPPKFLHVAKKF

SEQ ID NO: 4647 - protein, 19 aa, Artificial
  Short Peptide
KLKKFLKIPPKFLHVAKKF

SEQ ID NO: 4648 - protein, 19 aa, Artificial
  Short Peptide
KLKLLKKIPPKFLHVAKKF

SEQ ID NO: 4649 - protein, 19 aa, Artificial
  Short Peptide
KLKKLKKIPPKFLHVAKKF

SEQ ID NO: 4650 - protein, 19 aa, Artificial
  Short Peptide
KLKLFKKIPPKFLHVAKKF

SEQ ID NO: 4651 - protein, 19 aa, Artificial
  Short Peptide
KLKKFKKIPPKFLHVAKKF

SEQ ID NO: 4652 - protein, 18 aa, Artificial
  Short Peptide
KLKLLLKIPKFLHVAKKF

SEQ ID NO: 4653 - protein, 18 aa, Artificial
  Short Peptide
KLKKLLKIPKFLHVAKKF

SEQ ID NO: 4654 - protein, 18 aa, Artificial
  Short Peptide
KLKLFLKIPKFLHVAKKF

SEQ ID NO: 4655 - protein, 18 aa, Artificial
  Short Peptide
KLKKFLKIPKFLHVAKKF

SEQ ID NO: 4656 - protein, 18 aa, Artificial
  Short Peptide
KLKLLKKIPKFLHVAKKF

SEQ ID NO: 4657 - protein, 18 aa, Artificial
  Short Peptide
KLKKLKKIPKFLHVAKKF

SEQ ID NO: 4658 - protein, 18 aa, Artificial
  Short Peptide
KLKLFKKIPKFLHVAKKF

SEQ ID NO: 4659 - protein, 18 aa, Artificial
  Short Peptide
KLKKFKKIPKFLHVAKKF

SEQ ID NO: 4660 - protein, 20 aa, Artificial
  Short Peptide
KLKLLLKIPPPKFLHLAKKF

SEQ ID NO: 4661 - protein, 20 aa, Artificial
  Short Peptide
KLKKLLKIPPPKFLHLAKKF

SEQ ID NO: 4662 - protein, 20 aa, Artificial
  Short Peptide
KLKLFLKIPPPKFLHLAKKF

SEQ ID NO: 4663 - protein, 20 aa, Artificial
  Short Peptide
KLKKFLKIPPPKFLHLAKKF

SEQ ID NO: 4664 - protein, 20 aa, Artificial
  Short Peptide
KLKLLKKIPPPKFLHLAKKF

SEQ ID NO: 4665 - protein, 20 aa, Artificial
  Short Peptide
KLKKLKKIPPPKFLHLAKKF

SEQ ID NO: 4666 - protein, 20 aa, Artificial
  Short Peptide
KLKLFKKIPPPKFLHLAKKF

SEQ ID NO: 4667 - protein, 20 aa, Artificial
  Short Peptide
KLKKFKKIPPPKFLHLAKKF

SEQ ID NO: 4668 - protein, 19 aa, Artificial
  Short Peptide
KLKLLLKIPPKFLHLAKKF

SEQ ID NO: 4669 - protein, 19 aa, Artificial
  Short Peptide
KLKKLLKIPPKFLHLAKKF

SEQ ID NO: 4670 - protein, 19 aa, Artificial
  Short Peptide
KLKLFLKIPPKFLHLAKKF

SEQ ID NO: 4671 - protein, 19 aa, Artificial
  Short Peptide
KLKKFLKIPPKFLHLAKKF

SEQ ID NO: 4672 - protein, 19 aa, Artificial
  Short Peptide
KLKLLKKIPPKFLHLAKKF

SEQ ID NO: 4673 - protein, 19 aa, Artificial
  Short Peptide
KLKKLKKIPPKFLHLAKKF

SEQ ID NO: 4674 - protein, 19 aa, Artificial
  Short Peptide
KLKLFKKIPPKFLHLAKKF

SEQ ID NO: 4675 - protein, 19 aa, Artificial
  Short Peptide
KLKKFKKIPPKFLHLAKKF

SEQ ID NO: 4676 - protein, 18 aa, Artificial
  Short Peptide
KLKLLLKIPKFLHLAKKF

SEQ ID NO: 4677 - protein, 18 aa, Artificial
  Short Peptide
KLKKLLKIPKFLHLAKKF

SEQ ID NO: 4678 - protein, 18 aa, Artificial
  Short Peptide
KLKLFLKIPKFLHLAKKF

SEQ ID NO: 4679 - protein, 18 aa, Artificial
  Short Peptide
KLKKFLKIPKFLHLAKKF

SEQ ID NO: 4680 - protein, 18 aa, Artificial
  Short Peptide
KLKLLKKIPKFLHLAKKF

SEQ ID NO: 4681 - protein, 18 aa, Artificial
  Short Peptide
KLKKLKKIPKFLHLAKKF

SEQ ID NO: 4682 - protein, 18 aa, Artificial
  Short Peptide
KLKLFKKIPKFLHLAKKF

SEQ ID NO: 4683 - protein, 18 aa, Artificial
  Short Peptide
KLKKFKKIPKFLHLAKKF

SEQ ID NO: 4684 - protein, 20 aa, Artificial
  Short Peptide
KLKLLLKIPPPKFLHSAKKF

SEQ ID NO: 4685 - protein, 20 aa, Artificial
  Short Peptide
KLKKLLKIPPPKFLHSAKKF

SEQ ID NO: 4686 - protein, 20 aa, Artificial
  Short Peptide
KLKLFLKIPPPKFLHSAKKF

SEQ ID NO: 4687 - protein, 20 aa, Artificial
  Short Peptide
KLKKFLKIPPPKFLHSAKKF

SEQ ID NO: 4688 - protein, 20 aa, Artificial
  Short Peptide
KLKLLKKIPPPKFLHSAKKF

SEQ ID NO: 4689 - protein, 20 aa, Artificial
  Short Peptide
KLKKLKKIPPPKFLHSAKKF

SEQ ID NO: 4690 - protein, 20 aa, Artificial
  Short Peptide
KLKLFKKIPPPKFLHSAKKF

SEQ ID NO: 4691 - protein, 20 aa, Artificial
  Short Peptide
KLKKFKKIPPPKFLHSAKKF

SEQ ID NO: 4692 - protein, 19 aa, Artificial
  Short Peptide
KLKLLLKIPPKFLHSAKKF

SEQ ID NO: 4693 - protein, 19 aa, Artificial
  Short Peptide
KLKKLLKIPPKFLHSAKKF

SEQ ID NO: 4694 - protein, 19 aa, Artificial
  Short Peptide
KLKLFLKIPPKFLHSAKKF

SEQ ID NO: 4695 - protein, 19 aa, Artificial
  Short Peptide
KLKKFLKIPPKFLHSAKKF

SEQ ID NO: 4696 - protein, 19 aa, Artificial
  Short Peptide
KLKLLKKIPPKFLHSAKKF

SEQ ID NO: 4697 - protein, 19 aa, Artificial
  Short Peptide
KLKKLKKIPPKFLHSAKKF

SEQ ID NO: 4698 - protein, 19 aa, Artificial
  Short Peptide
KLKLFKKIPPKFLHSAKKF

SEQ ID NO: 4699 - protein, 19 aa, Artificial
  Short Peptide
KLKKFKKIPPKFLHSAKKF

SEQ ID NO: 4700 - protein, 18 aa, Artificial
  Short Peptide
KLKLLLKIPKFLHSAKKF

SEQ ID NO: 4701 - protein, 18 aa, Artificial
  Short Peptide
KLKKLLKIPKFLHSAKKF

SEQ ID NO: 4702 - protein, 18 aa, Artificial
  Short Peptide
KLKLFLKIPKFLHSAKKF

SEQ ID NO: 4703 - protein, 18 aa, Artificial
  Short Peptide
KLKKFLKIPKFLHSAKKF

SEQ ID NO: 4704 - protein, 18 aa, Artificial
  Short Peptide
KLKLLKKIPKFLHSAKKF

SEQ ID NO: 4705 - protein, 18 aa, Artificial
  Short Peptide
KLKKLKKIPKFLHSAKKF

SEQ ID NO: 4706 - protein, 18 aa, Artificial
  Short Peptide
KLKLFKKIPKFLHSAKKF

SEQ ID NO: 4707 - protein, 18 aa, Artificial
  Short Peptide
KLKKFKKIPKFLHSAKKF

SEQ ID NO: 4708 - protein, 18 aa, Artificial
  Short Peptide
KWKLFKKIPKFLHSAKKF

SEQ ID NO: 4709 - protein, 19 aa, Artificial
  Short Peptide
  MOD_RES (19)..(19): AMIDATION
KWKLFKKIGPKFLHLAKKF

SEQ ID NO: 4710 - protein, 19 aa, Artificial
  Short Peptide
  MOD_RES (19)..(19): AMIDATION
KWKLFKKGPGKFLHSAKKF

SEQ ID NO: 4711 - protein, 26 aa, Artificial
  Short Peptide
  MOD_RES (26)..(26): AMIDATION
KWKLFKKIEKVGQGPGKFLHSAKKFG

SEQ ID NO: 4712 - protein, 17 aa, Artificial
  Short Peptide
  MOD_RES (17)..(17): AMIDATION
WKLFKKIPKFLHLAKKF

SEQ ID NO: 4713 - protein, 17 aa, Artificial
  Short Peptide
  MOD_RES (17)..(17): AMIDATION
FKLFLLIPKFLHLAKKF

SEQ ID NO: 4714 - protein, 16 aa, Artificial
  Short Peptide
  MOD_RES (16)..(16): AMIDATION
KWFKKIPKFLHLAKKF

SEQ ID NO: 4715 - protein, 15 aa, Artificial
  Short Peptide
  MOD_RES (15)..(15): AMIDATION
WFKKIPKFLHLAKKF

SEQ ID NO: 4716 - protein, 15 aa, Artificial
  Short Peptide
  MOD_RES (15)..(15): AMIDATION
KWKKIPKFLHLLKKF

SEQ ID NO: 4717 - protein, 15 aa, Artificial
  Short Peptide
  MOD_RES (15)..(15): AMIDATION
WFKKIPKFLHLLKKF

SEQ ID NO: 4718 - protein, 17 aa, Artificial
  Short Peptide
  MOD_RES (17)..(17): AMIDATION
KWKLFKKIPFLHLAKKF

SEQ ID NO: 4719 - protein, 17 aa, Artificial
  Short Peptide
  MOD_RES (17)..(17): AMIDATION
KWKLFKKIPKFLHLAKK

SEQ ID NO: 4720 - protein, 16 aa, Artificial
  Short Peptide
  MOD_RES (16)..(16): AMIDATION
KWKLFKKIPLHLAKKF

SEQ ID NO: 4721 - protein, 16 aa, Artificial
  Short Peptide
  MOD_RES (16)..(16): AMIDATION
KWKLFKKIPKFLHLAK

SEQ ID NO: 4722 - protein, 15 aa, Artificial
  Short Peptide
  MOD_RES (15)..(15): AMIDATION
KWKLFKKIPHLAKKF

SEQ ID NO: 4723 - protein, 15 aa, Artificial
  Short Peptide
  MOD_RES (15)..(15): AMIDATION
KWKLFKKIPKFLHLA

SEQ ID NO: 4724 - protein, 14 aa, Artificial
  Short Peptide
  MOD_RES (14)..(14): AMIDATION
KWKLFKKIPLAKKF

SEQ ID NO: 4725 - protein, 14 aa, Artificial
  Short Peptide
  MOD_RES (14)..(14): AMIDATION
KWKLFKKIPKFLHL

SEQ ID NO: 4726 - protein, 18 aa, Artificial
  Short Peptide
  MOD_RES (18)..(18): AMIDATION
FKKALHLFKPIKKFLKWK

SEQ ID NO: 4727 - protein, 18 aa, Artificial
  Short Peptide
  MOD_RES (18)..(18): AMIDATION
KFLHLAKKFPKWKLFKKI

SEQ ID NO: 4728 - protein, 18 aa, Artificial
  Short Peptide
  MOD_RES (18)..(18): AMIDATION
KWKKLLKKPLLKKLLKKL

SEQ ID NO: 4729 - protein, 15 aa, Artificial
  Short Peptide
  MOD_RES (15)..(15): AMIDATION
KWKLKPLLKKLLKKL

SEQ ID NO: 4730 - protein, 14 aa, Artificial
  Short Peptide
  MOD_RES (14)..(14): AMIDATION
KWKKLLKKPLKLKL

SEQ ID NO: 4731 - protein, 11 aa, Artificial
  Short Peptide
  MOD_RES (11)..(11): AMIDATION
KLLKKPLKLKL

SEQ ID NO: 4732 - protein, 19 aa, Artificial
  Short Peptide
  MOD_RES (19)..(19): AMIDATION
PKWKLFKKIPKFLHLAKKF

SEQ ID NO: 4733 - protein, 19 aa, Artificial
  Short Peptide
  MOD_RES (19)..(19): AMIDATION
KWKLFKKIPKFLHLAKKFD

SEQ ID NO: 4734 - protein, 20 aa, Artificial
  Short Peptide
  MOD_RES (20)..(20): AMIDATION
PKWKLFKKIPKFLHLAKKFD

SEQ ID NO: 4735 - protein, 19 aa, Artificial
  Short Peptide
  MOD_RES (19)..(19): AMIDATION
GKWKLFKKIPKFLHLAKKF

SEQ ID NO: 4736 - protein, 19 aa, Artificial
  Short Peptide
  MOD_RES (19)..(19): AMIDATION
KWKLFKKIPKFLHLAKKFN

SEQ ID NO: 4737 - protein, 20 aa, Artificial
  Short Peptide
  MOD_RES (20)..(20): AMIDATION
GKWKLFKKIPKFLHLAKKFN

SEQ ID NO: 4738 - protein, 20 aa, Artificial
  Short Peptide
  MOD_RES (20)..(20): AMIDATION
PKWKLFKKIPKFLHLAKKFN
